(19) United States
(12) Patent Application Publication
(10) Pub. No.: US 2022/0290121 A1
(43) Pub. Date: Sep. 15, 2022

(54) Combinatorial Adenine and Cytosine DNA Base Editors

(71) Applicant: The General Hospital Corporation, Boston, MA (US)

(72) Inventors: J. Keith Joung, Winchester, MA (US); Ronghao Zhou, Charlestown, MA (US); Julian Grunewald, Charlestown, MA (US)

(21) Appl. No.: 17/638,133

(22) PCT Filed: Aug. 31, 2020
(86) PCT No.: PCT/US2020/048825

§ 371 Date: Feb. 24, 2022

Related U.S. Application Data
(60) Provisional application No. 63/023,192, filed on May 11, 2020.
(60) Provisional application No. 62/894,612, filed on Aug. 30, 2019.

(51) Int. Cl. C12N 15/10; C12P 21/02; C12P 19/34; C12N 9/78; C12N 9/22

(52) U.S. Cl. CPC C12N 15/102; C12P 21/02; C12P 19/34; C12N 9/78; C12N 9/22; C12Y 305/04004; C12Y 305/04005; C07K 2319/09; C07K 2319/80; C12N 2310/20

(57) ABSTRACT

Engineered bifunctional adenine and cytosine base editor (BACE) variants that enable expanded amino acid modifications and methods of using the same. Described herein are fusion proteins containing adenosine deaminases, cytidine deaminases, catalytically impaired CRISPR-Cas proteins (e.g., Cas9, CasX or Cas12 nucleases), linkers, nuclear localization signals (NLSs) and uracil-n-glycosylase inhibitors (UGIs) that enable the CRISPR-guided programmable introduction of simultaneous A-to-G (T-to-C) and C-to-T (G-to-A) substitutions in DNA.

### CLAIM OF PRIORITY

[0001] This application claims the benefit of U.S. Provisional Patent Application Ser. Nos. 62/894,612, filed on 30 Aug. 2019, and 63/023,192, filed on 11 May 2020. The entire contents of the foregoing are hereby incorporated by reference.

### FEDERALLY SPONSORED RESEARCH OR DEVELOPMENT

[0002] This invention was made with Government support under Grant No. HG009490 awarded by the National Institutes of Health and contract HR0011-17-2-0042 awarded by the Defense Advanced Research Projects Agency of the Department of Defense. The Government has certain rights in the invention.

### TECHNICAL FIELD

[0003] Described herein are fusion proteins containing adenosine deaminases, cytidine deaminases, catalytically impaired CRISPR-Cas proteins (e.g., Cas9, CasX or Cas12 nucleases), linkers, nuclear localization signals (NLSs) and uracil-n-glycosylase inhibitors (UGIs) that enable the CRISPR-guided programmable introduction of simultaneous A-to-G (T-to-C) and C-to-T (G-to-A) substitutions in DNA.

### BACKGROUND

[0004] DNA base editors represent a new class of genome editing tools that enable the programmable installation of single or multiple base substitutions. Current cytosine (CBE) and adenine (ABE) generations of base editors allow for the targeted deamination of cytosines and adenines that get exposed on ssDNA by RNA-guided CRISPR-Cas proteins¹⁻⁴. The majority of disease-associated genetic perturbations known to date are point mutations, also known as single nucleotide variants (SNVs). Current iterations of CBEs and ABEs can target disease-relevant transition mutations and revert them to the original genotype, e.g., correcting G-to-A (C-to-T) mutations using ABE. However, if the experimental or therapeutic goal of base editing is to modify amino acid (AA) residues, both CBEs and ABEs are limited.

### SUMMARY

[0005] Fusion proteins that contain both adenine and cytidine deaminases expand the potential for AA modification by enabling the programmable alteration of one to three neighboring codons by installing both A-to-G and C-to-T mutations side-by-side. These bifunctional adenine and cytosine editors (BACE) also allow for the correction of double or triple nucleotide variants (DNVs or TNVs) that are associated with disease.

[0006] Described herein are CRISPR-guided bifunctional adenine and cytosine base editors (BACEs) that enable the simultaneous installation of adenine-to-guanine and cytosine-to-thymine base edits within the same editing window at the ssDNA bubble generated by RNA-guided fusion proteins that contain both adenine (e.g., E. coli TadA) and cytosine (e.g., pmCDA1 or rAPOBEC1) deaminases as well as CRISPR-Cas proteins (e.g., S. pyogenes Cas9). The exemplary SpCas9-based synchronous programmable adenine and cytosine base editor (SPACE) fusion protein system described herein comprises a programmable DNA-binding domain fused to an adenosine deaminase, e.g., E. coli TadA or previously described engineered TadA variants to decrease RNA editing activity while still preserving DNA editing activity (SECURE or RRE variants) as well as to a cytidine deaminase, e.g., pmCDA1 or rAPOBEC1 or human APOBEC3A or human AID or human APOBEC3G or previously described engineered variants of these deaminases (e.g., rAPOBEC1 mutations from SECURE-BE3) with reduced RNA editing activity and preserved DNA editing capabilities⁵⁻⁹.

[0007] Thus, provided herein are bifunctional adenine and cytosine base editor (BACEs) comprising:

[0008] (i) an adenosine deaminase domain, e.g., a wild type (SEQ ID NO: 98) and/or engineered adenosine deaminase TadA monomer or dimer (e.g., homodimeris or heterodimeric TadA domains from ABEmax (SEQ ID NO:226), ABE7.10 (SEQ ID NO:227), or ABE8e (SEQ ID NO: 145); other options include monomer or dimer TadAs from ABEs 0.1, 0.2, 1.1, 1.2, 2.1, 2.2, 2.3, 2.4, 2.5, 2.6, 2.7, 2.8, 2.9, 2.10, 2.11, 2.12, 3.1, 3.2, 3.3, 3.4, 3.5, 3.6, 3.7, 3.8, 4.1, 4.2, 4.3, 5.1, 5.2, 5.3, 5.4, 5.5, 5.6, 5.7, 5.8, 5.9, 5.10, 5.11, 5.12, 5.13, 5.14, 6.1, 6.2, 6.3, 6.4, 6.5, 6.6, 7.1, 7.2, 7.3, 7.4, 7.5, 7.6, 7.7, 7.8, 7.9, 7.10 (SEQ ID NO: 139), or ABEmax (SEQ ID NO: 228), or ABE8.8 (SEQ ID NO: 148), ABE8.13 (SEQ ID NO: 149), ABE8.17 (SEQ ID NO: 150), ABE8.20 (SEQ ID NO: 151), ABE8e (SEQ ID NO: 145)—as well as K20A/R21A, V82G, or V106W variants thereof), E. coli TadA monomer, or homo- or heterodimers thereof fused to the N or C terminus, bearing one or more mutations in either or both monomers (e.g., the TadA mutant used in miniABEmax-V82G (SEQ ID 223), miniABEmax-K20A/R21A (SEQ ID 224), miniABEmax-V106W (SEQ ID 225) or any other variant from Tables C, N, and O), that decrease RNA editing activity while preserving DNA editing activity;

[0009] (ii) a cytidine deaminase from Tables A and B (e.g., pmCDA1, rat APOBEC1, human APOBEC3A, or human AID) or variations thereof with reduced RNA off-target editing, one or multiple uracil-n-clycosalyse inhibitors (UGIs); and

[0010] (iii) a programmable DNA binding domain (e.g., Cas9-D10A); and (iv) optionally further comprising one or more nuclear localization sequences (e.g., NLSs such as a bipartite NLS comprising the sequence KRTADGSEFEPKKKRKV (SEQ ID NO:229); an SV40 large T antigen NLS (PKKKRRV (SEQ ID NO:221)); or a nucleoplasmin NLS (KRPAATKKAGQAKKKK (SEQ ID NO:222)).

[0011] Exemplary BACEs include those provided in SEQ ID NOs:140-144.

[0012] In some embodiments, the adenosine deaminase comprises one or more mutations corresponding to E. coli TadA mutations in one or more TadA monomers shown in Table N, or an homologue or orthologue thereof (e.g., a TadA protein in Table C).

[0013] In some embodiments, the cytidine deaminase rat APOBEC1 (or any one of its ortho- or paralogues listed in Tables A or B) bears one or more mutations that decrease RNA editing activity while preserving DNA editing activity, wherein the mutations are at amino acid positions that correspond to residues P29, R33, K34, E181, and/or L182 of rat apolipoprotein B mRNA editing enzyme, catalytic polypeptide-like 1 (rAPOBEC1, SEQ ID NO:67).

[0014] In some embodiments, the cytidine deaminase rat APOBEC1 (e.g., or any one of its ortho- or paralogues listed in Tables A or B) bears one or more mutations at positions: P29F, P29T, R33A, K34A, R33A+K34A (double mutant), E181Q and/or L182A of SEQ ID NO:67 (rAPOBEC1, Rattus norvegicus APOBEC1).

[0015] In some embodiments, the BACE further include one or more mutations at its cytidine deaminase rat APOBEC1 (or any one of its ortho- or paralogues listed in Tables A or B) residues corresponding to E24, V25; R118, Y120, H121, R126; W224-K229; P168-1186; L173+L180; R15, R16, R17, to K15-17 & A15-17; Deletion E181-L210; P190+P191; Deletion L210-K229 (C-terminal); and/or Deletion S2-L14 (N-terminal) of SEQ ID NO:67, Table O.

[0016] In some embodiments, the BACE includes a linker between the adenosine deaminase monomer and/or between the adenosine deaminase monomer or single-chain dimers and the programmable DNA binding domain.

[0017] In some embodiments, the BACE includes a linker between the programmable DNA binding domain and the cytidine deaminase monomer (e.g., pmCDA1 or rAPOBEC1 or hA3A or hAID) or dimer.

[0018] In some embodiments, the BACE includes an N-terminal adenosine deaminase fusion (e.g., mutant TadA* monomer or dimer) and a C-terminal cytidine deaminase fusion (e.g., pmCDA1 or rAPOBEC1 or hA3A or AID).

[0019] In some embodiments, the BACE includes an N-terminal cytidine deaminase fusion (e.g., pmCDA1 or rAPOBEC1 or hA3A or AID) and a C-terminal adenosine deaminase fusion (e.g., mutant TadA* monomer or dimer).

[0020] In some embodiments, the BACE includes a heterodimeric combined N-terminal adenosine and cytidine deaminase fusion (e.g., pmCDA1 or rAPOBEC1 or hA3A or AID fused to TadA monomers or dimers with a linker) or a heterodimeric combined C-terminal adenosine and cytidine deaminase fusion (e.g., pmCDA1 or rAPOBEC1 or hA3A or AID fused to TadA monomers or dimers with a linker). In both N- and C-terminal positions of these “hybrid fusion deaminase designs” the deaminases can be fused in either of these two orders: NH2-cytidine deaminase-linker-adenosine deaminase or NH2-adenosine deaminase-linker-cytidine deaminase.

[0021] In some embodiments, the programmable DNA binding domain is selected from the group consisting of engineered C2H2 zinc-fingers, transcription activator effector-like effectors (TALEs), and Clustered Regularly Interspaced Short Palindromic Repeats (CRISPR) Cas RNA-guided nucleases (RGNs) and variants thereof (e.g., Tables L and M) (e.g., a “SPACE” as described herein).

[0022] In some embodiments, the CRISPR RGN is an ssDNA nickase or is catalytically inactive, e.g., a Cas9, CasX or Cas12a that has ssDNA nickase activity or is catalytically inactive.

[0023] Further provided herein are base editing systems comprising: (i) a BACE as described herein, wherein the programmable DNA binding domain is a CRISPR Cas RGN or a variant thereof; and (ii) at least one guide RNA compatible with the base editor that directs the base editor to a target sequence.

[0024] Also described herein are isolated nucleic acids encoding any of the BACEs or base editing systems described herein, as well as vectors comprising an isolated nucleic acid described herein.

[0025] Also provided are isolated host cells, preferably mammalian (e.g., human) host cells, comprising any of the nucleic acids described herein. In some embodiments, the isolated host cells described herein express a BACE as described herein.

[0026] Further, provided herein are methods for deaminating a selected adenine and/or cytosine in a nucleic acid; the methods include contacting the nucleic acid with a BACE, a base editing system, an isolated nucleic acid, a vector, or an isolated host cell described herein.

[0027] Additionally provided herein are compositions comprising a purified BACE, a base editing system, an isolated nucleic acid, a vector, and/or an isolated host cell described herein. In some embodiments, the composition includes one or more ribonucleoprotein (RNP) complexes, e.g., comprising a BACE and compatible gRNA.

[0028] Also provided herein are methods of inducing an amino acid change in a polypeptide. The methods include contacting a nucleotide that encodes the polypeptide the amino acid sequence of which is to be changed with a BACE, a base editing system, an isolated nucleic acid, a vector, or an isolated host cell described herein, preferably wherein the amino acid change comprises one of the amino acid changes listed in Table D, and optionally wherein the amino acid change is one that can or cannot be targeted by CBE and/or ABE.

[0029] In some embodiments, the BACE is used to correct or model (create) specific disease-related mutations as shown in Table E-K.

[0030] In some embodiments, the BACE or SPACE comprises one or more uracil-N-glycosylase inhibitors (UGIs). In some embodiments, the BACE or SPACE comprise a linker between the adenosine deaminase and the programmable DNA binding domain as well as the cytidine deaminase and the DNA binding domain. In some embodiments, the TadA domain can be monomeric, homodimeric or heterodimeric and contain all combinations of wild type (WT) E. coli TadA, or mutant variants of TadA.

[0031] In some embodiments the two deaminase domains can be located at the C-terminus (e.g., pmCDA1) and N-terminus (TadA) or vice versa or they can both be located at the C- or N-terminus.

[0032] In some embodiments, the programmable DNA binding domain is selected from the group consisting of engineered C2H2 zinc-fingers, transcription activator effector-like effectors (TALEs), and Clustered Regularly Interspaced Short Palindromic Repeats (CRISPR)-Cas RNA-guided nucleases (RGNs) and variants thereof.

[0033] In some embodiments, the CRISPR-Cas RGN is an ssDNA nickase or is catalytically inactive, e.g., a Cas9 or Cas12a that is catalytically inactive or has ssDNA nickase activity.

[0034] Also provided herein are base editing systems comprising (i) the adenine base editors described herein, wherein the programmable DNA binding domain is a CRISPR Cas RGN or a variant thereof; and (ii) at least one guide RNA compatible with the base editor that directs the base editor to a target sequence.

[0035] Also provided are isolated nucleic acids encoding the adenine base editors; vectors comprising the isolated nucleic acids; and isolated host cells, preferably mammalian host cells, comprising the nucleic acids. In some embodiments, the isolated host cell expresses an adenine base editor.

[0036] Further, provided herein are methods for deaminating a selected adenine in a nucleic acid, the method comprising contacting the nucleic acid with an adenine base editor or base editing system as described herein.

[0037] Also provided are compositions comprising a purified adenine base editor or base editing system as described herein. In some embodiments, the composition comprises one or more ribonucleoprotein (RNP) complexes, e.g., comprising a SPACE and compatible guide RNA.

[0038] These methods can be used for generating two or more sets of nucleic acids, each set comprising a plurality of sequences, wherein each set comprises one or more nucleic acids having the same sequence, and wherein each set differs from each of the other sets by at least one nucleotide. These methods include (i) providing a first nucleic acid comprising a first sequence, e.g., a reference or wild type sequence; (ii) contacting the first nucleic acids with a BACE as described herein, wherein the programmable DNA binding domain is a CRISPR Cas RGN or a variant thereof; and a least one guide RNA compatible with the base editor that directs the base editor to modify a selected nucleotide in the first sequence; and (iii) isolating a second nucleic acid comprising a sequence comprising the selected modification in the nucleotide sequence, to provide a second set of nucleic acids. The methods can include amplifying the second nucleic acids. Steps (i)-(iii) can optionally be repeated until a desired number of sets is obtained, e.g., until enough sets are obtained to include at least one set with a mutation at each position in a selection region of the sequence of the nucleic acid.

[0039] Unless otherwise defined, all technical and scientific terms used herein have the same meaning as commonly understood by one of ordinary skill in the art to which this invention belongs. Methods and materials are described herein for use in the present invention; other, suitable methods and materials known in the art can also be used. The materials, methods, and examples are illustrative only and not intended to be limiting. All publications, patent applications, patents, sequences, database entries, and other references mentioned herein are incorporated by reference in their entirety. In case of conflict, the present specification, including definitions, will control.

[0040] Other features and advantages of the invention will be apparent from the following detailed description and figures, and from the claims.

### DESCRIPTION OF DRAWINGS

[0041] FIG. 1. Schematic illustrating the architecture of SPACE. Schematic illustrating a SECURE miniABEmax-V82G or -K20A/R21A derived TadA* monomer fused to a nickase Cas9 (nCas9)-gRNA complex that directs A to I deamination in the ssDNA generated by nCas9-induced R-loop formation. On the C-terminus, pmCDA1 (or other cytidine deaminase with low RNA off-target editing, e.g., SECURE-BE3 rAPOBEC1 R33A or R33A/K34A and one or more UGI domains were fused to the DNA targeting protein.

[0042] FIG. 2. SPACE induces concurrent A-to-G and C-to-T base edits in human HEK293T cells at 28 sites. Heat maps showing on-target DNA A-to-G and C-to-T editing frequencies with 28 gRNAs (n=4 independent replicates). Numbering at the bottom represents the position of the respective base in the protospacer sequence with 1 being the most PAM-distal.

[0043] FIGS. 3A-C. A-to-G or C-to-T editing distributions of SPACE, miniABEmax-V82G, and Target-AID. Box and dot plots indicating the aggregate distribution of A-to-G and C-to-T edits across the entire protospacer with SPACE (A), miniABEmax-V82G (B), and Target-AID (C) using 28 gRNAs. In box plots, the box spans the interquartile range (IQR) (first to third quartiles), the horizontal line shows the median (second quartile) and whiskers extend to ±1.5×IQR. Single dots represent individual replicates. Graph shows the same data as shown in FIG. 2 (n=4).

[0044] FIG. 4. Allele frequency tables of DNA on-target editing by SPACE. Composition of alleles with frequencies of 1% or higher that result from SPACE editing with 28 gRNAs. Data are taken from the first replicate obtained for each gRNA on-target experiment shown in FIG. 2.

[0045] FIG. 5. On-target C-to-R (A/G) and A-to-Y (C/T) editing of miniABEmax-V82G, Target-AID, and SPACE. Box and dot plots showing on-target DNA C-to-R (A/G) and A-to-Y (C/T) editing frequencies with 28 gRNAs (n=4). In box plots, the box spans the interquartile range (IQR) (first to third quartiles), the horizontal line shows the median (second quartile) and whiskers extend to ±1.5×IQR. Single dots represent all Cs or As across the entire protospacer for all four replicates at each genomic site. Data from the same experiment as shown in FIG. 2.

[0046] FIG. 6. On-target indel frequencies induced by miniABEmax-V82G, Target-AID, and SPACE. Dot plots showing on-target DNA indel frequencies with 28 gRNAs (n=4). Single dots represent individual replicates. Data from the same experiment as shown in FIG. 2.

[0047] FIG. 7. DNA off-target editing by SPACE. Heat maps showing A-to-G and C-to-T DNA off-target editing frequencies with gRNAs targeted to HEK sites 2-4, EMX1 site 1, or FANCF site 1 (n=4 independent replicates). Location in the protospacer is indicated at the bottom with 1 being the most PAM-distal position.

[0048] FIG. 8. On-target DNA editing of SPACE compared to co-expression of miniABEmax-V82G and Target-AID (ABE & CBE mix) at 28 genomic sites. Heat maps showing on-target DNA A-to-G and C-to-T editing frequencies with 28 gRNAs (n=4 independent replicates). Numbering at the bottom represents the position of the respective base in the protospacer sequence with 1 being the most PAM-distal location.

[0049] FIGS. 9A-B. On-target C-to-T, A-to-G and dual editing, and indel frequencies induced by co-expression of miniABEmax-V82G and Target-AID compared with SPACE. A, Bar and dot plots showing mean sum of allele frequencies of all edited alleles with A-to-G only, C-to-T only, and concurrent A-to-G and C-to-T editing with 28 gRNAs (n=4). Single dots represent individual replicates. Error bars represent the standard deviation (SD). Data are from the same experiment as shown in FIG. 8. B, Dot plots showing on-target DNA indel frequencies with 28 gRNAs (n=4). Single dots represent individual replicates. Data are from the same experiment as shown in FIG. 8.

[0050] FIG. 10. Allele frequency tables of DNA on-target editing by co-expression of miniABEmax-V82G and Target-AID (ABE & CBE mix) compared to expression of SPACE. Composition of alleles with frequencies of 1% or higher that result from co-expression of miniABEmax-V82G and Target-AID (ABE & CBE mix) or SPACE editing with 28 gRNAs. Data are taken from the first replicate obtained for each target site shown in FIG. 8. Numbering indicates the position in the spacer with 1 being the most PAM-distal location.

[0051] FIGS. 11A-B. RNA off-target editing profile of SPACE. A, Jitter plots show transcriptomic A-to-I and C-to-U mutations detected in RNA-seq experiments from HEK293T cells. GFP control cells express no gRNA. Data are shown from three independent replicates. n=number of combined adenines and cytosines modified. B, Histograms showing the total number of RNA A-to-1 or C-to-U edits observed (y-axis) with different editing efficiencies (x-axis). n=number of modified adenines and cytosines. Experiments were performed in triplicate (data are from the same experiments shown in A).

[0052] FIGS. 12A-B. Potential amino acid and codon modifications induced by SPACE. A, Circos plot showing amino acid changes that can be induced by SPACE (gray), including amino acid changes in specific codon context, that are uniquely enabled (black). B, Circos plot showing 60 unique codon changes (with respect to the start codon) that can be induced by dual editing of adenines and cytosines by SPACE (grey), 18 of which (black) lead to unique SPACE-inducible amino acid changes with respect to the original codon (also see Table D).

[0053] FIG. 13. SPACE can introduce saturated mutagenesis across a region of interest. Schematic illustration showing an example wherein SPACE can introduce A>G, T>C, C>T, and G>A for every nucleotide available across a coding or non-coding region to introduce saturation mutagenesis, e.g. in the context of a SPACE tiling screen.

### DETAILED DESCRIPTION

[0054] ABEs install A-to-G transitions in DNA while CBEs allow for the installation of C-to-T mutations. However, a certain subset of mutations (double or triple nucleotide variants), as well as amino acid mutations that cannot be targeted with available CBEs and ABEs (e.g., transversion mutations) evade current base editing strategies.

[0055] We sought to investigate if the combination of two separate deaminases in one BE architecture would allow for efficient parallel A-to-G and C-to-T editing in one editing window in cells treated with this bifunctional adenine and cytosine editor (BACE). In its first iteration, we fused a mutant E. coli TadA monomer (adenosine deaminase), previously described in the context of miniABEmax-V82G, as well as pmCDA1 (cytidine deaminase) and two UGIs to a catalytically impaired Cas9 (D10A) which resulted in the engineering of the SpCas9-based adenine and cytosine editor (SPACE, FIG. 1). Transfection of this editor into human HEK293T cells yielded efficient simultaneous deamination of cytosines and adenines in the same editing window at multiple sites that we tested in quadruplicate experiments (FIG. 2). The distribution of dual base edits across the protospacer induced by SPACE resembles the respective editing distributions of miniABEmax-V82G and Target-AID (FIG. 3). To test if the edits are present in the same allele, we analyzed the frequency of alleles that show both edits and saw that, e.g., for HEK site 2, there is a substantial fraction of alleles that show both edits (FIG. 4).

[0056] Both the adenosine deaminase and the cytidine deaminase domain used in the exemplary versions of SPACE described herein were chosen due to their relatively small size (e.g., TadA*-V82G monomer instead of TadA-TadA* heterodimer used in WT-ABE) and their dramatically reduced RNA off-target editing (Grunewald et al, Nature Biotechnology 2019; FIGS. 11A-B).

Thus, described herein are variants of base editor fusion proteins that enable the parallel installation of two distinct transition mutations (C-to-T and A-to-G) simultaneously in one editing window, by fusing two deaminase domains to one DNA-binding protein (Cas9 nickase) and one or multiple uracil-glycosylase inhibitor (UGI) proteins. BACE editing with SPACE enables this combinatorial editing without introducing two separate ABE and CBE base editors into the cell, enabling easier stochiometric delivery of the two deaminases, as well as Cas9 and UGI components as well as a smaller packaging size compared to the delivery of two separate BEs. Additionally, the possibility to install two substitutions side-by-side in one or multiple codons will enable more expanded in vitro and in vivo amino acid and protein modifications. A table of potentially targetable amino acid changes are shown in Table D and a list of potential disease targets (using Cas proteins compatible with NGG, NG, NAA, and NGA PAMs) is shown in Table E-K.

### Exemplary Adenosine Deaminase Domains Used for SPACE and BACE

[0057] In some embodiments, the adenosine deaminase is TadA from E. coli, or an orthologue from a different prokaryote, e.g., S. aureus, or a homologue from the eukaryotic domain, such as yeast TAD1/2 or a mammalian species such as human (e.g., ADAT2; Table C). The tRNA-specific adenosine deaminase family members have high sequence homology and many of these orthologues may be compatible with one or more of the amino acid substitutions in E. coli TadA expected to cause an RRE phenotype and would be desirable in a SPACE or BACE architecture.

[0058] The wild type sequence of wild type E. coli TadA, available in uniprot at P68398, is as follows:

(SEQ ID NO: 1)
MSEVEFSHEYWMRHALTLAKRAWDEREVPVGAVINHNNRVIGEGWNRPI
GRHDPTAHAEIMALRQGGLVMQNYRLIDATLYVTLEPCVMCAGAMIHSR
IGRVVFGARDAKTGAAGSLMDVLHHPGMNHRVEITEGILADECAALLSD
FFRMRRQEIKAQKKAQSSTD.

[0059] The engineered E. coli TadA sequence present in ABE7.10 and ABEmax is as follows (SEQ ID: 226):

SEVEFSHEYWMRHALTLAKRARDEREVPVGAVLVLNNRVIGEGWNRAIG
LHDPTAHAEIMALRQGGLVMQNYRLIDATLYVTFEPCVMCAGAMIHSRI
GRVVFGVRNAKTGAAGSLMDVLHYPGMNHRVEITEGILADECAALLCYF
FRMPRQVFNAQKKAQSSTD.

[0060] In the most commonly used ABEs (ABE7.10 and ABEmax), these two proteins are fused using a 32 amino acid linker (bolded in sequence below), forming a heterodimer, the sequence of which is as follows (SEQ ID: 227):

MSEVEFSHEYWMRHALTLAKRAWDEREVPVGAVELVHNNRVIGEGWNRP
IGRHDPTAHAEIMALRQGGLVMQNYRLIDATLYVTLEPCVMCAGAMIHS
RIGRVVFGARDAKTGAAGSLMDVLHHPGNANHRVEITEGILADECAALL
SDFFRMRRQEIKAQKKAQSSTDSGGSSGGSSGSETPGTSESATPESSGG
SSGGSSEVEFSHEYWMRHALTLAKRARDEREVPVGAVLVLNNRVIGEGW
NRAIGLHDPTAHAEIMALRQGGLVMQNYRLIDATLYVTFEPCVMCAGAM
IHSRIGRVVFGVRNAKTGAAGSLMDVLHYPGMNHRVEITEGILADECAA
LLCYFFRMPRQVFNAQKKAQSSTD.

[0061] Other exemplary sequences are shown in Table C. These tRNA-specific adenosine deaminase orthologues and homologues also represent candidates for inclusion of the mutations previously described at analogous positions in these proteins.

[0062] In some embodiments, the base editors include catalytically dead adenine deaminase variants, e.g., E59A. (Gaudelli et al, 2017, PMID: 29160308) as part of a heterodimer.

[0063] In some embodiments, the adenosine deaminase domain (monomeric or dimeric) from ABE8s (also with additional V106W mutation) could be used (Gaudelli et al, Nature Biotechnology 2020, PMID: 32284586; SEQ-IDs: 148-151).

[0064] In some embodiments, the adenosine deaminase domain (monomeric or dimeric) from ABE8e (with V82G, K20A/R21A, or V106W mutations) could be used (Richter et al, Nature Biotechnology 2020, DOI: https://doi.org/10.1038/s41587-020-0453-z; SEQ-IDs: 145-147).

### Exemplary Cytidine Deaminase Domains Used for SPACE and BACE

[0065] A number of cytidine deaminase domains that can be used in the proteins described herein are known in the art. In some embodiments, the cytidine deaminase is pmCDA1 (sea lamprey) or APOBEC1 from rat, or from a different species (Table A), e.g., a different mammalian species such as H. sapiens. The APOBEC, AICDA (AID) and CDA1 family members have high sequence homology and represent potential candidates for BACE and SPACE BE architectures (Table B)^{2, 10-13}.

[0066] Specifically, rAPOBEC1, enhanced human A3A, and human AID^{6, 12, 14} or pmCDA1² (Grünewald et al, Nature Biotechnology, in press, preprint on bioRxiv doi: https://doi.org/10.1101/631721) are candidates for inclusion into the SPACE and BACE architectures. Alternatively, the CBE variants FERNY and evoFERNY (Thuronyi et al, Nature Biotechnology 2019, PMID 31332326; SEQ-IDs: 152-153) as well as the CBE variants YE1, YE2, and YEE (Kim et al, Nature Biotechnology 2017, PMID 28191901; SEQ-IDs: 154-156) could be used to e.g., achieve increased cytosine deamination in a 5′G context (Thuronyi et al) or to achieve less DNA and RNA off-targets (Kim et al).

### Programmable DNA Binding Domains

[0067] In some embodiments, the base editors include programmable DNA binding domains such as engineered C2H2 zinc-fingers, transcription activator effector-like effectors (TALEs), and Clustered Regularly Interspaced Short Palindromic Repeats (CRISPR) Cas RNA-guided nucleases (RGNs) and their variants, including ssDNA nickases (nCas9) or their analogs and catalytically inactive dead Cas9 (dCas9) and its analogs (e.g., as shown in Table L), and any engineered protospacer-adjacent motif (PAM) or high-fidelity variants (e.g., as shown in Table M). A programmable DNA binding domain is one that can be engineered to bind to a selected target sequence. CRISPR-Cas Nucleases Although herein we refer to Cas9, in general any Cas9-like nickase could be used (including the related Cpf1/Cas12a enzyme classes), unless specifically indicated.

[0068] See, e.g., Tables L and M. These orthologs, and mutants and variants thereof as known in the art, can be used in any of the fusion proteins described herein. See, e.g., WO 2017/040348 (which describes variants of SaCas9 and SpCas 9 with increased specificity) and WO 2016/141224 (which describes variants of SaCas9 and SpCas 9 with altered PAM specificity).

[0069] The Cas9 nuclease from S. pyogenes (hereafter simply Cas9) can be guided via simple base pair complementarity between 17-20 nucleotides of an engineered guide RNA (gRNA), e.g., a single guide RNA or crRNA/tracrRNA pair, and the complementary strand of a target genomic DNA sequence of interest that lies next to a protospacer adjacent motif (PAM), e.g., a PAM matching the sequence NGG or NAG (Shen et al., Cell Res (2013); Dicarlo et al., Nucleic Acids Res (2013); Jiang et al., Nat Biotechnol 31, 233-239 (2013); Jinek et al., Elife 2, e00471 (2013); Hwang et al., Nat Biotechnol 31, 227-229 (2013); Cong et al., Science 339, 819-823 (2013); Mali et al., Science 339, 823-826 (2013c); Cho et al., Nat Biotechnol 31, 230-232 (2013); Jinek et al., Science 337, 816-821 (2012)). The engineered CRISPR from Prevotella and Francisella 1 (Cpf1, also known as Cas12a) nuclease can also be used, e.g., as described in Zetsche et al., Cell 163, 759-771 (2015); Schunder et al., Int J Med Microbiol 303, 51-60 (2013); Makarova et al., Nat Rev Microbiol 13, 722-736 (2015); Fagerdund et al., Genome Biol 16, 251 (2015). Unlike SpCas9, Cpf1/Cas12a requires only a single 42-nt crRNA, which has 23 nt at its 3′ end that are complementary to the protospacer of the target DNA sequence (Zetsche et al., 2015). Furthermore, whereas SpCas9 recognizes an NGG PAM sequence that is 3′ of the protospacer, AsCpf1 and LbCp1 recognize TTTN PAMs that are found 5′ of the protospacer (Id.).

[0070] In some embodiments, the present system utilizes a wild type or variant Cas9 protein from S. pyogenes or Staphylococcus aureus, or a wild type or variant Cpf1 protein from Acidaminococcus sp. BV3L6 or Lachnospiraceae bacterium ND2006 either as encoded in bacteria or codon-optimized for expression in mammalian cells and/or modified in its PAM recognition specificity and/or its genome-wide specificity. A number of variants have been described; see, e.g., WO 2016/141224, PCT/US2016/049147, Kleinstiver et al., Nat Biotechnol. 2016 August; 34(8):869-74; Tsai and Joung, Nat Rev Genet. 2016 May; 17(5):300-12; Kleinstiver et al., Nature. 2016 Jan. 28; 529(7587):490-5; Shmakov et al., Mol Cell. 2015 Nov. 5; 60(3):385-97; Kleinstiver et al., Nat Biotechnol. 2015 December; 33(12):1293-1298; Dahlman et al., Nat Biotechnol. 2015 November; 33(11):1159-61; Kleinstiver et al., Nature. 2015 Jul. 23; 523(7561):481-5; Wyvekens et al., Hum Gene Ther. 2015 July; 26(7):425-31; Hwang et al., Methods Mol Biol. 2015; 1311:317-34; Osbom et al., Hum Gene Ther. 2015 February; 26(2):114-26; Konermann et al., Nature. 2015 Jan. 29; 517(7536):583-8; Fu et al., Methods Enzymol. 2014; 546:21-45; and Tsai et al., Nat Biotechnol. 2014 June; 32(6):569-76, inter alia. Concerning rAPOBEC1 itself, a number of variants have been described, e.g., Chen et al, RNA. 2010 May; 16(5):1040-52; Chester et al, EMBO J. 2003 Aug. 1; 22(15):3971-82: Teng et al, J Lipid Res. 1999 April; 40(4):623-35; Navaratnam et al, Cell. 1995 Apr. 21; 81(2):187-95; MacGinnitie et al, J Biol Chem. 1995 Jun. 16; 270(24):14768-75; Yamanaka et al, J Biol Chem. 1994 Aug. 26; 269(34):21725-34. The guide RNA is expressed or present in the cell together with the Cas9 or Cpf1. Either the guide RNA or the nuclease, or both, can be expressed transiently or stably in the cell or introduced as a purified protein or nucleic acid.

[0071] In some embodiments, the Cas9 also includes one of the following mutations, which reduce nuclease activity of the Cas9; e.g., for SpCas9, mutations at D10A or H840A (which creates a single-strand nickase).

[0072] In some embodiments, the SpCas9 variants also include mutations at one of each of the two sets of the following amino acid positions, which together destroy the nuclease activity of the Cas9: D10, E762, D839, H983, or D986 and H840 or N863, e.g., D10A/D10N and H840A/H840N/H840Y, to render the nuclease portion of the protein catalytically inactive; substitutions at these positions could be alanine (as they are in Nishimasu al., Cell 156, 935-949 (2014)), or other residues, e.g., glutamine, asparagine, tyrosine, serine, or aspartate, e.g., E762Q, H983N, H983Y, D986N, N863D, N863S, or N863H (see WO 2014/152432).

[0073] In some embodiments, the Cas9 is fused to one or more SV40 or bipartite (bp) nuclear localization sequences (NLSs) protein sequences; an exemplary (bp) NLS sequence is as follows: (KRTADGSEFES)PKKKRKV (SEQ ID NO: 24); others are known in the art and provided herein. Typically, the NLSs are at the N- and C-termini of a fusion protein, but can also be positioned at the N- or C-terminus, or between the DNA binding domain and the deaminase domain. Linkers as known in the art can be used to separate domains.

### TAL Effector Repeat Arrays

[0074] Transcription activator like effectors (TALEs) of plant pathogenic bacteria in the genus Xanthomonas play important roles in disease, or trigger defense, by binding host DNA and activating effector-specific host genes. Specificity depends on an effector-variable number of imperfect, typically ˜33-35 amino acid repeats. Polymorphisms are present primarily at repeat positions 12 and 13, which are referred to herein as the repeat variable-diresidue (RVD). The RVDs of TAL effectors correspond to the nucleotides in their target sites in a direct, linear fashion, one RVD to one nucleotide, with some degeneracy and no apparent context dependence. In some embodiments, the polymorphic region that grants nucleotide specificity may be expressed as a triresidue or triplet.

[0075] Each DNA binding repeat can include a RVD that determines recognition of a base pair in the target DNA sequence, wherein each DNA binding repeat is responsible for recognizing one base pair in the target DNA sequence. In some embodiments, the RVD can comprise one or more of: HA for recognizing C; ND for recognizing C; HI for recognizing C; HN for recognizing G; NA for recognizing G; SN for recognizing G or A; YG for recognizing T; and NK for recognizing G, and one or more of: HD for recognizing C; NG for recognizing T; NI for recognizing A; NN for recognizing G or A; NS for recognizing A or C or G or T; N* for recognizing C or T, wherein * represents a gap in the second position of the RVD; HG for recognizing T; H* for recognizing T, wherein * represents a gap in the second position of the RVD; and IG for recognizing T.

TALE proteins may be useful in research and biotechnology as targeted chimeric nucleases that can facilitate homologous recombination in genome engineering (e.g., to add or enhance traits useful for biofuels or biorenewables in plants). These proteins also may be useful as, for example, transcription factors, and especially for therapeutic applications requiring a very high level of specificity such as therapeutics against pathogens (e.g., viruses) as non-limiting examples.

[0076] Methods for generating engineered TALE arrays are known in the art, see, e.g., the fast ligation-based automatable solid-phase high-throughput (FLASH) system described in U.S. Ser. No. 61/610,212, and Reyon et al., Nature Biotechnology 30, 460-465 (2012); as well as the methods described in Bogdanove & Voytas, Science 333, 1843-1846 (2011); Bogdanove et al., Curr Opin Plant Biol 13, 394-401 (2010); Scholze & Boch, J. Curr Opin Microbiol (2011); Boch et al., Science 326, 1509-1512 (2009); Moscou & Bogdanove, Science 326, 1501 (2009); Miller et al., Nat Biotechnol 29, 143-148 (2011); Morbitzer et al., T. Proc Natl Acad Sci USA 107, 21617-21622 (2010); Morbitzer et al., Nucleic Acids Res 39, 5790-5799 (2011); Zhang et al., Nat Biotechnol 29, 149-153 (2011); Geissler et al., PLoS ONE 6, e19509 (2011); Weber et al., PLoS ONE 6, e19722 (2011); Christian et al., Genetics 186, 757-761 (2010); Li et al., Nucleic Acids Res 39, 359-372 (2011); Mahfouz et al., Proc Natl Acad Sci USA 108, 2623-2628 (2011); Mussolino et al., Nucleic Acids Res (2011); Li et al., Nucleic Acids Res 39, 6315-6325 (2011); Cermak et al., Nucleic Acids Res 39, e82 (2011); Wood et al., Science 333, 307 (2011); Hockemeye et al. Nat Biotechnol 29, 731-734 (2011); Tesson et al., Nat Biotechnol 29, 695-696 (2011); Sander et al., Nat Biotechnol 29, 697-698 (2011); Huang et al., Nat Biotechnol 29, 699-700 (2011); and Zhang et al., Nat Biotechnol 29, 149-153 (2011); all of which are incorporated herein by reference in their entirety.

### Zinc Fingers

[0077] Zinc finger (ZF) proteins are DNA-binding proteins that contain one or more zinc fingers, independently folded zinc-containing mini-domains, the structure of which is well known in the art and defined in, for example, Miller et al., 1985, EMBO J., 4:1609; Berg, 1988, Proc. Natl. Acad. Sci. USA, 85:99; Lee et al., 1989, Science. 245:635; and Klug, 1993, Gene, 135:83. Crystal structures of the zinc finger protein Zif268 and its variants bound to DNA show a semi-conserved pattern of interactions, in which typically three amino acids from the alpha-helix of the zinc finger contact three adjacent base pairs or a “subsite” in the DNA (Pavletich et al., 1991, Science, 252:809; Elrod-Erickson et al., 1998, Structure, 6:451). Thus, the crystal structure of Zif268 suggested that zinc finger DNA-binding domains might function in a modular manner with a one-to-one interaction between a zinc finger and a three-base-pair “subsite” in the DNA sequence. In naturally occurring zinc finger transcription factors, multiple zinc fingers are typically linked together in a tandem array to achieve sequence-specific recognition of a contiguous DNA sequence (Klug, 1993, Gene 135:83).

[0078] Multiple studies have shown that it is possible to artificially engineer the DNA binding characteristics of individual zinc fingers by randomizing the amino acids at the alpha-helical positions involved in DNA binding and using selection methodologies such as phage display to identify desired variants capable of binding to DNA target sites of interest (Rebar et al., 1994, Science, 263:671; Choo et al., 1994 Proc. Natl. Acad. Sci. USA, 91:11163; Jamieson et al., 1994, Biochemistry 33:5689; Wu et al., 1995 Proc. Natl. Acad. Sci. USA, 92: 344). Such recombinant zinc finger proteins can be fused to functional domains, such as transcriptional activators, transcriptional repressors, methylation domains, and nucleases to regulate gene expression, alter DNA methylation, and introduce targeted alterations into genomes of model organisms, plants, and human cells (Carroll, 2008, Gene Ther., 15:1463-68; Cathomen, 2008, Mol. Ther., 16:1200-07; Wu et al., 2007, Cell. Mol. Life Sci., 64:2933-44).

[0079] One existing method for engineering zinc finger arrays, known as “modular assembly,” advocates the simple joining together of pre-selected zinc finger modules into arrays (Segal et al., 2003, Biochemistry, 42:2137-48; Beerli et al., 2002, Nat. Biotechnol., 20:135-141; Mandell et al., 2006, Nucleic Acids Res., 34:W516-523; Carroll et al., 2006, Nat. Protoc. 1:1329-41; Liu et al., 2002, J. Biol. Chem., 277:3850-56; Bae et al., 2003, Nat. Biotechnol., 21:275-280; Wright et al., 2006, Nat. Protoc., 1:1637-52). Although straightforward enough to be practiced by any researcher, recent reports have demonstrated a high failure rate for this method, particularly in the context of zinc finger nucleases (Ramirez et al., 2008, Nat. Methods, 5:374-375; Kim et al., 2009, Genome Res. 19:1279-88), a limitation that typically necessitates the construction and cell-based testing of very large numbers of zinc finger proteins for any given target gene (Kim et al., 2009, Genome Res. 19:1279-88).

[0080] Combinatorial selection-based methods that identify zinc finger arrays from randomized libraries have been shown to have higher success rates than modular assembly (Maeder et al., 2008, Mol. Cell, 31:294-301; Joung et al., 2010, Nat. Methods, 7:91-92; Isalan et al., 2001, Nat. Biotechnol., 19:656-660). In preferred embodiments, the zinc finger arrays are described in, or are generated as described in, WO 2011/017293 and WO 2004/099366. Additional suitable zinc finger DBDs are described in U.S. Pat. Nos. 6,511,808, 6,013,453, 6,007,988, and 6,503,717 and U.S. patent application 2002/0160940.

### Uracil Glycosylase Inhibitor (UGI)

[0081] In some embodiments, the DBD is fused to one or more Uracil glycosylase inhibitor (UGI) protein sequences; an exemplary UGI sequence is as follows:

(SEQ ID NO: 230; Uniprot: P14739)
TNLSDIIEKETGKQLVIQESILMLPEEVEEVIGNKPESDILVHTAYDES
TDENVMLLTSDAPEYKPWALVIQDSNGENKIKML,

Typically, the UGIs are at the C-terminus of a fusion protein as described herein, but can also be positioned at the N-terminus, or between the DNA binding domain and a deaminase domain. Linkers as known in the art can be used to separate domains.

### Variants

[0082] In some embodiments, the components of the fusion proteins are at least 80%, e.g., at least 85%, 90%, 95%, 97%, or 99% identical to the amino acid sequence of a exemplary sequence (e.g., as provided herein), e.g., have differences at up to 1%, 2%, 5%, 10%, 15%, or 20% of the residues of the exemplary sequence replaced, e.g., with conservative mutations, e.g., including or in addition to the mutations described herein. In preferred embodiments, the variant retains a desired activity of the parent, e.g., deaminase activity, and/or the ability to interact with a guide RNA and/or target DNA, optionally with improved specificity or altered substrate specificity.

[0083] To determine the percent identity of two nucleic acid sequences, the sequences are aligned for optimal comparison purposes (e.g., gaps can be introduced in one or both of a first and a second amino acid or nucleic acid sequence for optimal alignment and non-homologous sequences can be disregarded for comparison purposes). The length of a reference sequence aligned for comparison purposes is at least 80% of the length of the reference sequence, and in some embodiments is at least 90% or 100%. The nucleotides at corresponding amino acid positions or nucleotide positions are then compared. When a position in the first sequence is occupied by the same nucleotide as the corresponding position in the second sequence, then the molecules are identical at that position (as used herein nucleic acid “identity” is equivalent to nucleic acid “homology”). The percent identity between the two sequences is a function of the number of identical positions shared by the sequences, taking into account the number of gaps, and the length of each gap, which need to be introduced for optimal alignment of the two sequences. Percent identity between two polypeptides or nucleic acid sequences is determined in various ways that are within the skill in the art, for instance, using publicly available computer software such as Smith Waterman Alignment (Smith, T. F. and M. S. Waterman (1981) J Mol Biol 147:195-7); “BestFit” (Smith and Waterman, Advances in Applied Mathematics, 482-489 (1981)) as incorporated into GeneMatcher Plus™ Schwarz and Dayhof (1979) Atlas of Protein Sequence and Structure, Dayhof, M. O., Ed, pp 353-358; BLAST program (Basic Local Alignment Search Tool; (Altschul, S. F., W. Gish, et al. (1990) J Mol Biol 215: 403-10), BLAST-2, BLAST-P, BLAST-N, BLAST-X, WU-BLAST-2, ALIGN, ALIGN-2, CLUSTAL, or Megalign (DNASTAR) software. In addition, those skilled in the art can determine appropriate parameters for measuring alignment, including any algorithms needed to achieve maximal alignment over the length of the sequences being compared. In general, for proteins or nucleic acids, the length of comparison can be any length, up to and including full length (e.g., 5%, 10%, 20%, 30%, 40%, 50%, 60%, 70%, 80%, 90%, 95%, or 100%). For purposes of the present compositions and methods, at least 80% of the full length of the sequence is aligned.

[0084] For purposes of the present disclosure, the comparison of sequences and determination of percent identity between two sequences can be accomplished using a Blossum 62 scoring matrix with a gap penalty of 12, a gap extend penalty of 4, and a frameshift gap penalty of 5.

[0085] Conservative substitutions typically include substitutions within the following groups: glycine, alanine; valine, isoleucine, leucine; aspartic acid, glutamic acid, asparagine, glutamine; serine, threonine; lysine, arginine; and phenylalanine, tyrosine.

[0086] Also provided herein are isolated nucleic acids encoding the base editor fusion proteins, vectors comprising the isolated nucleic acids, optionally operably linked to one or more regulatory domains for expressing the variant proteins, and host cells, e.g., mammalian host cells, comprising the nucleic acids, and optionally expressing the variant proteins. In some embodiments, the host cells are stem cells, e.g., hematopoietic stem cells.

[0087] In some embodiments, the fusion proteins include a linker between the DNA binding domain (e.g., ZFN, TALE, or nCas9) and the BE domains. Linkers that can be used in these fusion proteins (or between fusion proteins in a concatenated structure) can include any sequence that does not interfere with the function of the fusion proteins. In preferred embodiments, the linkers are short, e.g., 2-20 amino acids, and are typically flexible (i.e., comprising amino acids with a high degree of freedom such as glycine, alanine, and serine). In some embodiments, the linker comprises one or more units consisting of GGGS (SEQ ID NO:135) or GGGGS (SEQ ID NO:136), e.g., two, three, four, or more repeats of the GGGS (SEQ ID NO:137) or GGGGS (SEQ ID NO:138) unit. Other linker sequences can also be used.

[0088] In some embodiments, the deaminase fusion protein includes a cell-penetrating peptide sequence that facilitates delivery to the intracellular space, e.g., HIV-derived TAT peptide, penetratins, transportans, or hCT derived cell-penetrating peptides, see, e.g., Caron et al., (2001) Mol Ther. 3(3):310-8; Langel, Cell-Penetrating Peptides: Processes and Applications (CRC Press, Boca Raton Fla. 2002); El-Andaloussi et al., (2005) Curr Pharm Des. 11(28):3597-611; and Deshayes et al., (2005) Cell Mol Life Sci. 62(16):1839-49.

[0089] Cell penetrating peptides (CPPs) are short peptides that facilitate the movement of a wide range of biomolecules across the cell membrane into the cytoplasm or other organelles, e.g., the mitochondria and the nucleus. Examples of molecules that can be delivered by CPPs include therapeutic drugs, plasmid DNA, oligonudeotides, siRNA, peptide-nucleic acid (PNA), proteins, peptides, nanopartides, and liposomes. CPPs are generally 30 amino acids or less, are derived from naturally or non-naturally occurring protein or chimeric sequences, and contain either a high relative abundance of positively charged amino acids, e.g., lysine or arginine, or an alternating pattern of polar and non-polar amino acids. CPPs that are commonly used in the art include Tat (Frankel et al., (1988) Cell. 55:1189-1193, Vives et al., (1997) J. Biol. Chem. 272:16010-16017), penetratin (Derossi et al., (1994) J. Biol. Chem. 269:10444-10450), polyarginine peptide sequences (Wender et al., (2000) Proc. Natl. Acad. Sci. USA 97:13003-13008, Futaki et al., (2001) J. Biol. Chem. 276:5836-5840), and transportan (Pooga et al., (1998) Nat. Biotechnol. 16:857-861).

[0090] CPPs can be linked with their cargo through covalent or non-covalent strategies. Methods for covalently joining a CPP and its cargo are known in the art, e.g., chemical cross-linking (Stetsenko et al., (2000) J. Org. Chem. 65:4900-4909, Gait et al. (2003) Cell. Mol. Life. Sci. 60:844-853) or cloning a fusion protein (Nagahara et al., (1998) Nat. Med. 4:1449-1453). Non-covalent coupling between the cargo and short amphipathic CPPs comprising polar and non-polar domains is established through electrostatic and hydrophobic interactions.

[0091] CPPs have been utilized in the art to deliver potentially therapeutic biomolecules into cells. Examples include cyclosporine linked to polyarginine for immunosuppression (Rothbard et al., (2000) Nature Medicine 6(11):1253-1257), siRNA against cyclin B1 linked to a CPP called MPG for inhibiting tumorigenesis (Crombez et al., (2007) Biochem Soc. Trans. 35:44-46), tumor suppressor p53 peptides linked to CPPs to reduce cancer cell growth (Takenobu et al., (2002) Mol. Cancer Ther. 1(12):1043-1049, Snyder et al., (2004) PLoS Biol. 2:E36), and dominant negative forms of Ras or phosphoinositol 3 kinase (PI3K) fused to Tat to treat asthma (Myou et al., (2003) J. Immunol. 171:4399-4405).

[0092] CPPs have been utilized in the art to transport contrast agents into cells for imaging and biosensing applications. For example, green fluorescent protein (GFP) attached to Tat has been used to label cancer cells (Shokolenko et al., (2005) DNA Repair 4(4):511-518). Tat conjugated to quantum dots have been used to successfully cross the blood-brain barrier for visualization of the rat brain (Santra et al., (2005) Chem. Commun. 3144-3146). CPPs have also been combined with magnetic resonance imaging techniques for cell imaging (Liu et al., (2006) Biochem. and Biophys. Res. Comm. 347(1):133-140). See also Ramsey and Flynn, Pharmacol Ther. 2015 Jul. 22. pii: S0163-7258(15)00141-2.

[0093] Alternatively or in addition, the deaminase fusion proteins can include a nuclear localization sequence, e.g., SV40 large T antigen NLS (PKKKRRV (SEQ ID NO:221)); nucleoplasmin NLS (KRPAATKKAGQAKKKK (SEQ ID NO:222); or bipartite NLS (KRTADGSEFEPKKKRKV (SEQ ID NO:229); or (KRTADGSEFES)PKKKRKV (SEQ ID NO: 24). Other NLSs are known in the art; see, e.g., Cokol et al., EMBO Rep. 2000 Nov. 15; 1(5): 411-415; Freitas and Cunha, Curr Genomics. 2009 December; 10(8): 550-557.

[0094] In some embodiments, the deaminase fusion proteins include a moiety that has a high affinity for a ligand, for example GST, FLAG or hexahistidine sequences. Such affinity tags can facilitate the purification of recombinant deaminase fusion proteins.

[0095] The deaminase fusion proteins described herein can be used for altering the genome of a cell. The methods generally include expressing or contacting the deaminase fusion proteins in the cells; in versions using one or two Cas9s, the methods include using a guide RNA having a region complementary to a selected portion of the genome of the cell. Methods for selectively altering the genome of a cell are known in the art, see, e.g., U.S. Pat. No. 8,993,233; US 20140186958; U.S. Pat. No. 9,023,649; WO/2014/099744; WO 2014/089290; WO2014/144592; WO144288; WO2014/204578; WO2014/152432; WO2115/099850; U.S. Pat. No. 8,697,359; US20160024529; US20160024524; US20160024523; US20160024510; US20160017366; US20160017301; US20150376652; US20150356239; US20150315576; US20150291965; US20150252358; US20150247150; US20150232883; US20150232882; US20150203872; US20150191744; US20150184139; US20150176064; US20150167000; US20150166969; US20150159175; US20150159174; US20150093473; US20150079681; US20150067922; US20150056629; US20150044772; US20150024500; US20150024499; US20150020223; US20140356867; US20140295557; US20140273235; US20140273226; US20140273037; US20140189896; US20140113376; US20140093941; US20130330778; US20130288251; US20120088676; US20110300538; US20110236530; US20110217739; US20110002889; US20100076057; US20110189776; US20110223638; US20130130248; US20150050699; US20150071899; US20150050699; US20150045546; US20150031134; US20150024500; US20140377868; US20140357530; US20140349400; US20140335620; US20140335063; US20140315985; US20140310830; US20140310828; US20140309487; US20140304853; US20140298547; US20140295556; US20140294773; US20140287938; US20140273234; US20140273232; US20140273231; US20140273230; US20140271987; US20140256046; US20140248702; US20140242702; US20140242700; US20140242699; US20140242664; US20140234972; US20140227787; US20140212869; US20140201857; US20140199767; US20140189896; US20140186958; US20140186919; US20140186843; US20140179770; US20140179006; US20140170753; WO/2008/108989; WO/2010/054108; WO/2012/164565; WO/2013/098244; WO/2013/176772; US 20150071899; Makarova et al., “Evolution and classification of the CRISPR-Cas systems” 9(6) Nature Reviews Microbiology 467-477 (1-23) (June 2011); Wiedenheft et al., “RNA-guided genetic silencing systems in bacteria and archaea” 482 Nature 331-338 (Feb. 16, 2012); Gasiunas et al., “Cas9-crRNA ribonucleoprotein complex mediates specific DNA cleavage for adaptive immunity in bacteria” 109(39) Proceedings of the National Academy of Sciences USA E2579-E2586 (Sep. 4, 2012); Jinek et al., “A Programmable Dual-RNA-Guided DNA Endonuclease in Adaptive Bacterial Immunity” 337 Science 816-821 (Aug. 17, 2012); Carroll, “A CRISPR Approach to Gene Targeting” 20(9) Molecular Therapy 1658-1660 (September 2012); U.S. Appl. No. 61/652,086, filed May 25, 2012; AI-Attar et al., Clustered Regularly Interspaced Short Palindromic Repeats (CRISPRs): The Hallmark of an Ingenious Antiviral Defense Mechanism in Prokaryotes, Biol Chem. (2011) vol. 392, Issue 4, pp. 277-289; Hale et al., Essential Features and Rational Design of CRISPR RNAs That Function With the Cas RAMP Module Complex to Cleave RNAs, Molecular Cell, (2012) vol. 45, Issue 3, 292-302.

[0096] For methods in which the deaminase fusion proteins are delivered to cells, the proteins can be produced using any method known in the art, e.g., by in vitro translation, or expression in a suitable host cell from nucleic acid encoding the deaminase fusion protein; a number of methods are known in the art for producing proteins. For example, the proteins can be produced in and purified from yeast, E. coli, insect cell lines, plants, transgenic animals, or cultured mammalian cells; see, e.g., Palomares et al., “Production of Recombinant Proteins: Challenges and Solutions,” Methods Mol Biol. 2004; 267:15-52. In addition, the deaminase fusion proteins can be linked to a moiety that facilitates transfer into a cell, e.g., a lipid nanoparticle, optionally with a linker that is cleaved once the protein is inside the cell. See, e.g., LaFountaine et al., Int J Pharm. 2015 Aug. 13; 494(1):180-194.

### Expression Systems

[0097] To use the deaminase fusion proteins described herein, it may be desirable to express them from a nucleic acid that encodes them. This can be performed in a variety of ways. For example, the nucleic acid encoding the deaminase fusion can be cloned into an intermediate vector for transformation into prokaryotic or eukaryotic cells for replication and/or expression. Intermediate vectors are typically prokaryote vectors, e.g., plasmids, or shuttle vectors, or insect vectors, for storage or manipulation of the nucleic acid encoding the deaminase fusion for production of the deaminase fusion protein. The nucleic acid encoding the deaminase fusion protein can also be cloned into an expression vector, for administration to a plant cell, animal cell, preferably a mammalian cell or a human cell, fungal cell, bacterial cell, or protozoan cell. To obtain expression, a sequence encoding a deaminase fusion protein is typically subcloned into an expression vector that contains a promoter to direct transcription. Suitable bacterial and eukaryotic promoters are well known in the art and described, e.g., in Sambrook et al., Molecular Cloning, A Laboratory Manual (3d ed. 2001); Kriegler, Gene Transfer and Expression: A Laboratory Manual (1990); and Current Protocols in Molecular Biology (Ausubel et al., eds., 2010). Bacterial expression systems for expressing the engineered protein are available in, e.g., E. coli, Bacillus sp., and Salmonella (Palva et al., 1983, Gene 22:229-235). Kits for such expression systems are commercially available. Eukaryotic expression systems for mammalian cells, yeast, and insect cells are well known in the art and are also commercially available.

[0098] The promoter used to direct expression of a nucleic acid depends on the particular application. For example, a strong constitutive promoter is typically used for expression and purification of fusion proteins. In contrast, when the deaminase fusion protein is to be administered in vivo for gene regulation, either a constitutive or an inducible promoter can be used, depending on the particular use of the deaminase fusion protein. In addition, a preferred promoter for administration of the deaminase fusion protein can be a weak promoter, such as HSV TK or a promoter having similar activity. The promoter can also include elements that are responsive to transactivation, e.g., hypoxia response elements, Gal4 response elements, lac repressor response element, and small molecule control systems such as tetracycline-regulated systems and the RU-486 system (see, e.g., Gossen & Bujard, 1992, Proc. Natl. Acad. Sci. USA, 89:5547; Oligino et al., 1998, Gene Ther., 5:491-496; Wang et al., 1997, Gene Ther., 4:432-441; Neering et al., 1996, Blood, 88:1147-55; and Rendahl et al., 1998, Nat. Biotechnol., 16:757-761).

[0099] In addition to the promoter, the expression vector typically contains a transcription unit or expression cassette that contains all the additional elements required for the expression of the nucleic acid in host cells, either prokaryotic or eukaryotic. A typical expression cassette thus contains a promoter operably linked, e.g., to the nucleic acid sequence encoding the deaminase fusion protein, and any signals required, e.g., for efficient polyadenylation of the transcript, transcriptional termination, ribosome binding sites, or translation termination. Additional elements of the cassette may include, e.g., enhancers, and heterologous spliced intronic signals.

[0100] The particular expression vector used to transport the genetic information into the cell is selected with regard to the intended use of the deaminase fusion protein, e.g., expression in plants, animals, bacteria, fungus, protozoa, etc. Standard bacterial expression vectors include plasmids such as pBR322 based plasmids, pSKF, pET23D, and commercially available tag-fusion expression systems such as GST and LacZ.

[0101] Expression vectors containing regulatory elements from eukaryotic viruses are often used in eukaryotic expression vectors, e.g., SV40 vectors, papilloma virus vectors, and vectors derived from Epstein-Barr virus. Other exemplary eukaryotic vectors include pMSG, pAV009/A+, pMTO10/A+, pMAMneo-5, baculovirus pDSVE, and any other vector allowing expression of proteins under the direction of the SV40 early promoter, SV40 late promoter, metallothionein promoter, murine mammary tumor virus promoter, Rous sarcoma virus promoter, polyhedrin promoter, or other promoters shown effective for expression in eukaryotic cells.

[0102] The vectors for expressing the deaminase fusion protein can include RNA Pol III promoters to drive expression of the guide RNAs, e.g., the H1, U6 or 7SK promoters. These human promoters allow for expression of deaminase fusion protein in mammalian cells following plasmid transfection.

[0103] Some expression systems have markers for selection of stably transfected cell lines such as thymidine kinase, hygromycin B phosphotransferase, and dihydrofolate reductase. High yield expression systems are also suitable, such as using a baculovirus vector in insect cells, with the gRNA encoding sequence under the direction of the polyhedrin promoter or other strong baculovirus promoters.

[0104] The elements that are typically included in expression vectors also include a replicon that functions in E. coli, a gene encoding antibiotic resistance to permit selection of bacteria that harbor recombinant plasmids, and unique restriction sites in nonessential regions of the plasmid to allow insertion of recombinant sequences.

[0105] Standard transfection methods are used to produce bacterial, mammalian, yeast or insect cell lines that express large quantities of protein, which are then purified using standard techniques (see, e.g., Colley et al., 1989, J. Biol. Chem., 264:17619-22; Guide to Protein Purification, in Methods in Enzymology, vol. 182 (Deutscher, ed., 1990)). Transformation of eukaryotic and prokaryotic cells are performed according to standard techniques (see, e.g., Morrison, 1977, J. Bacteriol. 132:349-351; Clark-Curtiss & Curtiss, Methods in Enzymology 101:347-362 (Wu et al., eds, 1983).

[0106] Any of the known procedures for introducing foreign nucleotide sequences into host cells may be used. These include the use of calcium phosphate transfection, polybrene, protoplast fusion, electroporation, nucleofection, liposomes, microinjection, naked DNA, plasmid vectors, viral vectors, both episomal and integrative, and any of the other well-known methods for introducing cloned genomic DNA, cDNA, synthetic DNA or other foreign genetic material into a host cell (see, e.g., Sambrook et al., supra). It is only necessary that the particular genetic engineering procedure used be capable of successfully introducing at least one gene into the host cell capable of expressing the deaminase fusion protein.

[0107] In methods wherein the fusion proteins include a Cas9 domain, the methods also include delivering at least one gRNA that interacts with the Cas9, or a nucleic acid that encodes a gRNA.

[0108] Alternatively, the methods can include delivering the deaminase fusion protein and guide RNA together, e.g., as a complex. For example, the deaminase fusion protein and gRNA can be can be overexpressed in a host cell and purified, then complexed with the guide RNA (e.g., in a test tube) to form a ribonudeoprotein (RNP), and delivered to cells. In some embodiments, the deaminase fusion protein can be expressed in and purified from bacteria through the use of bacterial expression plasmids. For example, His-tagged deaminase fusion protein can be expressed in bacterial cells and then purified using nickel affinity chromatography. The use of RNPs circumvents the necessity of delivering plasmid DNAs encoding the nuclease or the guide, or encoding the nuclease as an mRNA. RNP delivery may also improve specificity, presumably because the half-life of the RNP is shorter and there's no persistent expression of the nuclease and guide (as you'd get from a plasmid). The RNPs can be delivered to the cells in vivo or in vitro, e.g., using lipid-mediated transfection or electroporation. See, e.g., Liang et al. “Rapid and highly efficient mammalian cell engineering via Cas9 protein transfection.” Journal of biotechnology 208 (2015): 44-53; Zuris, John A., et al. “Cationic lipid-mediated delivery of proteins enables efficient protein-based genome editing in vitro and in vivo.” Nature biotechnology 33.1 (2015): 73-80; Kim et al. “Highly efficient RNA-guided genome editing in human cells via delivery of purified Cas9 ribonucleoproteins.” Genome research 24.6 (2014): 1012-1019.

[0109] The present invention also includes the vectors and cells comprising the vectors, as well as kits comprising the proteins and nucleic acids described herein, e.g., for use in a method described herein.

### Methods of Use

[0110] The base editors described herein can be used to deaminate a selected adenine and/or cytosine, enabling the parallel installation of two distinct transition mutations (C-to-T and A-to-G) simultaneously in one editing window, in a nucleic acid sequence, e.g., in a cell, e.g., a plant, bacterial, fungal, or animal cell. The cell can be isolated (e.g., ex vivo or in vitro) or in an animal (e.g., a mammal such as a human or veterinary subject), or a synthetic nucleic acid substrate, e.g., in vitro. The nucleic acid sequence can be, e.g., genomic DNA or mitochondrial DNA. The methods include contacting the nucleic acid with a BACE as described herein; in some embodiments the methods can be used to induce a change as shown in Table D. Where the base editor includes a CRISPR Cas9 or Cas12a protein, the methods further include the use of one or more guide RNAs (gRNAs) that direct binding of the base editor to a sequence to be deaminated. The target sequence (editing window) is located on the non-target strand (NTS), so it's the ssDNA strand that's opened up when Cas9 opens up DNA, but it's not bound by the gRNA. The NTS protospacer sequence in the target organism's DNA has the same sequence as the gRNA's spacer sequence (for both base and prime editing). Thus when SPACE is used, the gRNA protospacer directs the base editor to the target sequence, preferably wherein the target sequence comprises a cytosine to be edited at one of positions 2-7, or an adenine to be edited at one of positions 4-7.

[0111] For example, the base editors described herein can be used for in vitro, in vivo or in situ directed evolution, e.g., to engineer polypeptides or proteins based on a synthetic selection framework, e.g., antibiotic resistance in E. coli or resistance to anti-cancer therapeutics being assayed in mammalian cells (e.g., CRISPR-X Hess et al, Nat Methods. 2016 December; 13(12):1036-1042, or BE-plus systems Jiang et al, Cell Res. 2018 August; 28(8):855-861). The BACEs described herein can also be used, e.g., for targeted sequence diversification.

[0112] In some embodiments, the BACEs can be used to correct or alter a disease-causing mutation, or to introduce a protective mutation, in a cell, e.g., in a human cell, e.g., in vitro/ex vivo or in vivo; exemplary mutations can include those listed in Table E. When the alteration is made ex vivo, the edited cell can then be re-introduced into the subject. These methods can be used to treat, reduce risk of developing, delay onset of, or ameliorate a disease, e.g., a disease listed in Table E.

[0113] The BACEs can also be used to generate a cell or animal model by introducing a mutation, e.g., a disease-causing mutation, e.g., a multinucleotide variant (MNV, i.e., a variant found in phase with another variant), e.g., a MNV mutation as listed in Tables F-K. See, e.g., Example 9.

[0114] BACE/SPACE could be used for introducing A>G, T>C (A>G on the other strand), C>T, or G>A (C>T on the other strand) for every nucleotide available across a coding/non-coding region to generate a comprehensive library. This can enable high-throughput saturation mutagenesis screening and highly complex genotype-phenotype correlation to study a protein or gene of interest.

[0115] These methods can be used for generating two or more sets of nucleic acids, each set comprising a plurality of sequences, wherein each set comprises one or more nucleic acids having the same sequence, and wherein each set differs from each of the other sets by at least one nucleotide. These methods include (i) providing a first nucleic acid comprising a first sequence, e.g., a reference or wild type sequence; (ii) contacting the first nucleic acids with a BACE as described herein, wherein the programmable DNA binding domain is a CRISPR Cas RGN or a variant thereof; and a least one guide RNA compatible with the base editor that directs the base editor to modify a selected nucleotide in the first sequence; and (iii) isolating a second nucleic acid comprising a sequence comprising the selected modification in the nucleotide sequence, to provide a second set of nucleic acids. The methods can include amplifying the second nucleic acids. Steps (i)-(iii) can be repeated until a desired number of sets is obtained, e.g., until enough sets are obtained to include at least one set with a mutation at each position in a selection region of the sequence of the nucleic acid.

[0116] In some embodiments, each separate set of variant is expressed in a separate organism, and effects on phenotype can be evaluated, e.g., for programmable sequence diversification. As one example, the methods can be used to develop a plant with a desired characteristic (e.g., early harvest, pest resistance, drought tolerance, taste, sweetness, storage, resistance to browning). The methods can be used to mutate a region in a specific gene, e.g., to shuffle the region, to produce a number of variant plants. The plants can then be grown, and effects on the desired characteristic evaluated and selected. See, e.g., Li et al., Nat Biotechnol (2020). doi.org/10.1038/s41587-019-0393-7; FIG. 13 and Example 10.

### TABLES

TABLE A

| | | Uniprot | | Seq |
|---|---|---|---|---|
| APOBEC1 | | accession | | ID |
| orthologue | Species | number | Version number | NO: |
| African | Loxodonta | G3U0R4 | version 30 of the | 1 |
| elephant | africana | | entry and version 1 of | |
| | | | the sequence | |
| African lungfish | Protopterus | A0A0M3N0G8 | version 4 of the entry | 2 |
| | annectens | | and version 1 of the | |
| | | | sequence | |
| American | Alligator | A0A151P6M4 | version 9 of the entry | 3 |
| alligator | mississippiensis | | and version 1 of the | |
| | | | sequence | |
| American | Anolis | F1CGT0 | version 16 of the | 4 |
| chameleon | carolinensis | | entry and version 1 of | |
| | | | the sequence | |
| American crow | Corvus | A0A091EQ78 | version 8 of the entry | 5 |
| | brachyrhynchos | | and version 1 of the | |
| | | | sequence | |
| Anna's | Calypte anna | A0A091IIG0 | version 9 of the entry | 6 |
| hummingbird | | | and version 1 of the | |
| | | | sequence | |
| Atlantic | Tursiops | A0A2U4ALA1 | version 2 of the entry | 7 |
| bottle-nosed | truncatus | | and version 1 of the | |
| dolphin | | | sequence | |
| Barn owl | Tyto alba | A0A093FY71 | version 6 of the entry | 8 |
| | | | and version 1 of the | |
| | | | sequence | |
| Black flying | Pteropus alecto | L5KGJ8 | version 13 of the | 9 |
| fox | | | entry and version 1 of | |
| | | | the sequence | |
| Black | Rhinopithecus | A0A2K6KS69 | version 5 of the entry | 10 |
| snub-nosed | bieti | | and version 1 of the | |
| monkey | | | sequence | |
| Beluga whale | Delphinapterus | A0A2Y9NGP5 | version 1 of the entry | 11 |
| | leucas | | and version 1 of the | |
| | | | sequence | |
| Bengalese | Lonchura | A0A218ULD2 | version 3 of the entry | 12 |
| finch | striata | | and version 1 of the | |
| | domestica | | sequence | |
| Blue-fronted | Amazona | A0A0Q3WRD0 | version 5 of the entry | 13 |
| Amazon parrot | aestiva | | and version 1 of the | |
| | | | sequence | |
| Bolivian | Saimiri | A0A2K6U925 | version 5 of the entry | 14 |
| squirrel | boliviensis | | and version 1 of the | |
| monkey | boliviensis | | sequence | |
| Bonobo | Pan paniscus | A0A2R9A0R0 | version 2 of the entry | 15 |
| | | | and version 1 of the | |
| | | | sequence | |
| Bornean | Pongo | Q694B3 | version 60 of the | 16 |
| orangutan | pygmaeus | | entry and version 2 of | |
| | | | the sequence | |
| Bovine | Bos taurus | E1BP99 | version 40 of the | 17 |
| | | | entry and version 1 of | |
| | | | the sequence | |
| Brandt's bat | Myotis brandtii | S7PYX0 | version 9 of the entry | 18 |
| | | | and version 1 of the | |
| | | | sequence | |
| Cat | Felis catus | M3WB96 | version 31 of the | 19 |
| | | | entry and version 2 of | |
| | | | the sequence | |
| Cebus | Cebus | A0A2K5PZC0 | version 5 of the entry | 20 |
| capucinus | capucinus | | and version 1 of the | |
| imitator | imitator | | sequence | |
| Chimpanzee | Pan troglodytes | H2Q5C6 | version 32 of the | 21 |
| | | | entry and version 1 of | |
| | | | the sequence | |
| Chinese | Alligator | A0A1U7S7K7 | version 5 of the entry | 22 |
| alligator | sinensis | | and version 1 of the | |
| | | | sequence | |
| Chinese | Cricetulus | G3I1S7 | version 15 of the | 23 |
| hamster | griseus | | entry and version 1 of | |
| | | | the sequence | |
| Chuck-will's-widow | Antrostomus | A0A094MFH1 | version 10 of the | 24 |
| | carolinensis | | entry and version 1 of | |
| | | | the sequence | |
| Coquerel's | Propithecus | A0A2K6EVT9 | version 5 of the entry | 25 |
| sifaka | coquereli | | and version 1 of the | |
| | | | sequence | |
| Crab-eating | Macaca | G8F4P7 | version 11 of the | 26 |
| macaque | fascicularis | | entry and version 1 of | |
| | | | the sequence | |
| Crested ibis | Nipponia | A0A091V7F8 | version 9 of the entry | 27 |
| | nippon | | and version 1 of the | |
| | | | sequence | |
| Dalmatian | Pelecanus | A0A091SSF0 | version 8 of the entry | 28 |
| pelican | crispus | | and version 1 of the | |
| | | | sequence | |
| Damaraland | Fukomys | A0A091CVE5 | version 9 of the entry | 29 |
| mole rat | damarensis | | and version 1 of the | |
| | | | sequence | |
| David's myotis | Myotis davidii | L5LUG3 | version 11 of the | 30 |
| | | | entry and version 1 of | |
| | | | the sequence | |
| Dog | Canis lupus | F1PUJ5 | version 41 of the | 31 |
| | familiaris | | entry and version 2 of | |
| | | | the sequence | |
| Downy | Dryobates | A0A093GVH6 | version 9 of the entry | 32 |
| woodpecker | pubescens | | and version 1 of the | |
| | | | sequence | |
| Drill | Mandrillus | A0A2K5Z8Y4 | version 4 of the entry | 33 |
| | leucophaeus | | and version 1 of the | |
| | | | sequence | |
| East | Balearica | A0A087VMP5 | version 8 of the entry | 34 |
| African grey | regulorum | | and version 1 of the | |
| crowned-crane | gibbericeps | | sequence | |
| Emperor | Aptenodytes | A0A087QNJ5 | version 8 of the entry | 35 |
| penguin | forsteri | | and version 1 of the | |
| | | | sequence | |
| Enhydra lutris | Enhydra lutris | A0A2Y9IYV0 | version 1 of the entry | 36 |
| kenyoni | kenyoni | | and version 1 of the | |
| | | | sequence | |
| European | Mustela | B2NIW5 | version 34 of the | 37 |
| domestic ferret | putorius furo | | entry and version 1 of | |
| | | | the sequence | |
| Florida | Trichechus | A0A2Y9E587 | version 1 of the entry | 38 |
| manatee | manatus | | and version 1 of the | |
| | latirostris | | sequence | |
| Giant panda | Ailuropoda | G1LKL4 | version 27 of the | 39 |
| | melanoleuca | | entry and version 1 of | |
| | | | the sequence | |
| Golden-collared | Manacus | A0A093PWR2 | version 8 of the entry | 40 |
| manakin | vitellinus | | and version 1 of the | |
| | | | sequence | |
| Golden | Mesocricetus | Q9EQP0 | version 73 of the | 41 |
| hamster | auratus | | entry and version 1 of | |
| | | | the sequence | |
| Golden | Rhinopithecus | A0A2K6PRF3 | version 4 of the entry | 42 |
| snub-nosed | roxellana | | and version 1 of the | |
| monkey | | | sequence | |
| Green monkey | Chlorocebus | A0A0D9RBS4 | version 11 of the | 43 |
| | sabaeus | | entry and version 1 of | |
| | | | the sequence | |
| Guinea pig | Cavia porcellus | A0A286XNR2 | version 5 of the entry | 44 |
| | | | and version 1 of the | |
| | | | sequence | |
| Hawaiian monk | Neomonachus | A0A2Y9HAT6 | version 1 of the entry | 45 |
| seal | schauinslandi | | and version 1 of the | |
| | | | sequence | |
| Hoatzin | Opisthocomus | A0A091XJL0 | version 8 of the entry | 46 |
| | hoazin | | and version 1 of the | |
| | | | sequence | |
| Horse | Equus ferus | F6WR88 | version 28 of the | 47 |
| | caballus | | entry and version 1 of | |
| | | | the sequence | |
| Human | Homo sapiens | P41238 | version 166 of the | 48 |
| | | | entry and version 3 of | |
| | | | the sequence | |
| Kea | Nestor notabilis | A0A091RU17 | version 8 of the entry | 49 |
| | | | and version 1 of the | |
| | | | sequence | |
| Little egret | Egretta garzetta | A0A091IWL9 | version 10 of the | 50 |
| | | | entry and version 1 of | |
| | | | the sequence | |
| Ma's night | Aotus | A0A2K5DG70 | version 6 of the entry | 51 |
| monkey | nancymaae | | and version 1 of the | |
| | | | sequence | |
| Mouse | Mus musculus | P51908 | version 150 of the | 52 |
| | | | entry and version 1 of | |
| | | | the sequence | |
| Naked mole rat | Heterocephalus | G5BPM8 | version 16 of the | 53 |
| | glaber | | entry and version 1 of | |
| | | | the sequence | |
| Northern | Merops nubicus | A0A091QEK6 | version 8 of the entry | 54 |
| carmine | | | and version 1 of the | |
| bee-eater | | | sequence | |
| Northern | Fulmarus | A0A093LP85 | version 9 of the entry | 55 |
| fulmar | glacialis | | and version 1 of the | |
| | | | sequence | |
| Northern | Nomascus | G1QZV0 | version 31 of the | 56 |
| white-cheeked | leucogenys | | entry and version 1 of | |
| gibbon | | | the sequence | |
| Olive baboon | Papio anubis | A0A096MWB4 | version 19 of the | 57 |
| | | | entry and version 2 of | |
| | | | the sequence | |
| Gray | Monodelphis | Q9TUI7 | version 101 of the | 58 |
| short-tailed | domestica | | entry and version 1 of | |
| Opossum | | | the sequence | |
| Ord's kangaroo | Dipodomys ordii | A0A1S3FTE2 | version 3 of the entry | 59 |
| rat | | | and version 1 of the | |
| | | | sequence | |
| Pacific walrus | Odobenus | A0A2U3WPA5 | version 2 of the entry | 60 |
| | rosmarus | | and version 1 of the | |
| | divergens | | sequence | |
| Patagioenas | Patagioenas | A0A1V4JAP2 | version 3 of the entry | 61 |
| fasciata monilis | fasciata monilis | | and version 1 of the | |
| | | | sequence | |
| Peters' Angolan | Colobus | A0A2K5JKV4 | version 4 of the entry | 62 |
| colobus | angolensis | | and version 1 of the | |
| | palliatus | | sequence | |
| Philippine | Tarsius syrichta | A0A1U7U8J6 | version 3 of the entry | 63 |
| tarsier | | | and version 1 of the | |
| | | | sequence | |
| Pig | Sus scrofa | F1SLW4 | version 37 of the | 64 |
| | | | entry and version 2 of | |
| | | | the sequence | |
| Pig-tailed | Macaca | A0A2K6BGI5 | version 4 of the entry | 65 |
| macaque | nemestrina | | and version 1 of the | |
| | | | sequence | |
| Rabbit | Oryctolagus | P47855 | version 96 of the | 66 |
| | cuniculus | | entry and version 1 of | |
| | | | the sequence | |
| Rat | Rattus | P38483 | version 137 of the | 67 |
| | norvegicus | | entry and version 1 of | |
| | | | the sequence | |
| Red-legged | Cariama | A0A091M4D7 | version 10 of the | 68 |
| seriema | cristata | | entry and version 1 of | |
| | | | the sequence | |
| Red throated | Gavia stellata | A0A093F3R4 | version 8 of the entry | 69 |
| diver | | | and version 1 of the | |
| | | | sequence | |
| Rhesus | Macaca mulatta | G7N5W0 | version 19 of the | 70 |
| macaque | | | entry and version 1 of | |
| | | | the sequence | |
| Rifleman | Acanthisitta | A0A091MEP8 | version 8 of the entry | 71 |
| (Acanthisitta | chloris | | and version 1 of the | |
| chloris) | | | sequence | |
| Rock dove | Columba livia | A0A2I0LXZ8 | version 3 of the entry | 72 |
| | | | and version 1 of the | |
| | | | sequence | |
| Sheep | Ovis aries | W5NVH9 | version 19 of the | 73 |
| | | | entry and version 1 of | |
| | | | the sequence | |
| Small-eared | Otolemur | H0XVG8 | version 27 of the | 74 |
| galago | garnettii | | entry and version 1 of | |
| (Garnett's greater | | | the sequence | |
| bushbaby) | | | | |
| Smooth | Stylophora | A0A2B4RXQ3 | version 4 of the entry | 75 |
| cauliflower | pistillata | | and version 1 of the | |
| coral | | | sequence | |
| Sooty | Cercocebus | A0A2K5L2J6 | version 5 of the entry | 76 |
| mangabey | atys | | and version 1 of the | |
| | | | sequence | |
| Sperm whale | Physeter | A0A2Y9T649 | version 1 of the entry | 77 |
| | macrocephalus | | and version 1 of the | |
| | | | sequence | |
| Sumatran | Pongo abelii | H2NGD0 | version 24 of the | 78 |
| orangutan | | | entry and version 1 of | |
| | | | the sequence. | |
| Sunbittern | Eurypyga helias | A0A093JI54 | version 8 of the entry | 79 |
| | | | and version 1 of the | |
| | | | sequence | |
| Tasmanian | Sarcophilus | G3W4I1 | version 32 of the | 80 |
| devil | harrisii | | entry and version 1 of | |
| | | | the sequence | |
| Weddell seal | Leptonychotes | A0A2U3Y3M5 | version 2 of the entry | 81 |
| | weddellii | | and version 1 of the | |
| | | | sequence | |
| Western | Erinaceus | A0A1S3AN78 | version 3 of the entry | 82 |
| European | europaeus | | and version 1 of the | |
| hedgehog | | | sequence | |
| White-tailed | Haliaeetus | A0A091PSV3 | version 8 of the entry | 83 |
| sea-eagle | albicilla | | and version 1 of the | |
| | | | sequence | |
| White tufted | Callithrix | F7F6M6 | version 31 of the | 84 |
| ear marmoset | jacchus | | entry and version 2 of | |
| | | | the sequence | |
| Wild yak | Bos mutus | L8IDZ0 | version 15 of the | 85 |
| | | | entry and version 1 of | |
| | | | the sequence | |
| Yellow-throated | Pterocles | A0A093CIQ8 | version 5 of the entry | 86 |
| sandgrouse | gutturalis | | and version 1 of the | |
| | | | sequence | |

TABLE B
Exemplary APOBEC/AID family proteins. The following table lists
(in alphabetical order) exemplary APOBEC family homologues.

| APOBEC/AID | Uniprot | | |
|---|---|---|---|
| family | accession | | Seq. |
| homologue | number | Version number | ID |
| Rat APOBEC1 | P38483 | version 137 of the entry | 67 |
| | | and version 1 of the | |
| | | sequence | |
| Human AID | Q9GZX7 | version 155 of the entry | 87 |
| (AICDA) | | and version 1 of the | |
| | | sequence | |
| Human | P41238 | version 166 of the entry | 48 |
| APOBEC1 | | and version 3 of the | |
| | | sequence | |
| Human | Q9Y235 | version 132 of the entry | 88 |
| APOBEC2 | | and version 1 of the | |
| | | sequence | |
| Human | P31941 | version 160 of the entry | 89 |
| APOBEC3A | | and version 3 of the | |
| | | sequence | |
| Human | Q9UH17 | version 150 of the entry | 90 |
| APOBEC3B | | and version 1 of the | |
| | | sequence | |
| Human | Q9NRW3 | version 147 of the entry | 91 |
| APOBEC3C | | and version 2 of the | |
| | | sequence | |
| Human | Q96AK3 | version 127 of the entry | 92 |
| APOBEC3D | | and version 1 of the | |
| | | sequence | |
| Human | Q8IUX4 | version 143 of the entry | 93 |
| APOBEC3F | | and version 3 of the | |
| | | sequence | |
| Human | Q9HC16 | version 168 of the entry | 94 |
| APOBEC3G | | and version 1 of the | |
| | | sequence | |
| Human | Q6NTF7 | version 115 of the entry | 95 |
| APOBEC3H | | and version 4 of the | |
| | | sequence | |
| Petromyzon | NCBI Genbank: | Version 1 of the entry, | 96 |
| marinus cytosine | ABO15149.1 | accession EF094822.1 | |
| deaminase | Uniprot: A5H718 | | |
| (pmCDA1) | | | |
| Petromyzon | Same sequence | — | 97 |
| marinus cytosine | as ID 96, but | | |
| deaminase | with R187W | | |
| (pmCDA1) | mutation | | |

TABLE C
Exemplary TadA proteins. Some or all residues listed
in Table A as well as combinations thereof might
also be introduced in any of these TadA orthologues
or tRNA adenosine deaminase homologues (see FIG.
5 for alignments of these TadA proteins).

| tRNA-specific | Uniprot | | |
|---|---|---|---|
| adenosine | accession | Sequence | Seq. |
| deaminase | number | version # | ID |
| E. coli TadA | P68398 | 2 | 98 |
| S. aureus TadA | Q99W51 | 1 | 99 |
| S. pyogenes TadA | Q5XE14 | 2 | 100 |
| S. typhi TadA | Q8XGY4 | 2 | 101 |
| A. aeolicus TadA | O67050 | 1 | 102 |
| S. pombe TAD2 | O94642 | 2 | 103 |
| S. cerevisiae TAD1 | P53065 | 1 | 104 |
| S. cerevisiae TAD2 | P47058 | 1 | 105 |
| A. thaliana TAD2 | Q6IDB6 | 1 | 106 |
| X. laevis ADAT2 | Q4V7V8 | 1 | 107 |
| X. tropicalis ADAT2 | Q0P4H0 | 1 | 108 |
| D. rerio ADAT2 | Q5RIV4 | 2 | 109 |
| B. taurus ADAT2 | Q5E9J7 | 1 | 110 |
| M. musculus ADAT2 | Q6P6J0 | 1 | 111 |
| H. sapiens ADAT2 | Q7Z6V5 | 1 | 112 |

TABLE D
Unique codon and amino acid changes inducible with SPACE
compared to those by ABE or CBE alone. Listing potential codon changes, as
well as amino acid modifications that can be induced by CBE, ABE, and SPACE.

| | | Codon | AA | Codon | AA | Codon | AA | |
|---|---|---|---|---|---|---|---|---|
| WT | WT | mutations | mutations | mutations | mutations | mutations | mutations | |
| codon | AA | by ABE | by ABE | by CBE | by CBE | by SPACE | by SPACE | |
| AAC | N | GGC, GAC, | N > G, | AAT | = | GGT, AAT, | N > G, = , | A > G |
| | | AGC | N > D, N > S | | | GAC, AGC, | N > D, N > S | and |
| | | | | | | GGC, GAT, | | C > T |
| | | | | | | AGT | | |
| ACA | T | GCG, GCA, | T > A, = | ATA | T > I | [chemical structure] | [chemical structure] | |
| | | ACG | | | | GCA, ACG, | [chemical structure] | |
| | | | | | | [chemical structure] | | |
| | | | | | | [chemical structure] | | |
| ACC | T | GCC | T > A | ATT, ATC, | T > I, = | [chemical structure] | [chemical structure] | |
| | | | | ACT | | GCC, ACT, | T > A, = | |
| | | | | | | [chemical structure] | | |
| | | | | | | GCT | | |
| ACG | T | GCG | T > A | ATG | T > M | [chemical structure] | [chemical structure] | |
| | | | | | | GCG | T > A | |
| ACT | T | GCT | T > A | ATT | T > I | [chemical structure] | [chemical structure] | |
| | | | | | | GCT | T > A | |
| AGC | S | GGC | S > G | AGT | = | GGT, AGT, | S > G, = | |
| | | | | | | GGC | | |
| ATC | I | GTC | I > V | ATT | = | GTT, ATT, | I > V, = | |
| | | | | | | GTC | | |
| CA | Q | CGG, CGA, | Q > R, = | TAA | Q > STOP | [chemical structure] | [chemical structure] | |
| | | CAG | | | | CGA, CAG, | Q > STOP, | |
| | | | | | | CGG, TGA, | Q > R, = | |
| | | | | | | TAG | | |
| CAC | H | CGC | H > R | TAT, TAC, | H > Y, = | [chemical structure] | [chemical structure] | |
| | | | | CAT | | CGC, CAT, | H > R, = | |
| | | | | | | [chemical structure] | | |
| | | | | | | CGT | | |
| CAG | Q | CGG | Q > R | TAG | Q > STOP | [chemical structure] | [chemical structure] | |
| | | | | | | CGG | Q > STOP, | |
| | | | | | | | Q > R | |
| CAT | H | CGT | H > R | TAT | H > Y | [chemical structure] | [chemical structure] | |
| | | | | | | CGT | H > R | |
| CCA | P | CCG | = | TTA, TCA, | P > L, P > S | TTG, TCA, | P > L, P > S, = | |
| | | | | CTA | | CCG, CTA, | | |
| | | | | | | TTA, TCG, | | |
| | | | | | | CTG | | |
| CGA | R | CGG | = | TGA | R > STOP | [chemical structure] | [chemical structure] | |
| | | | | | | CGG | R > STOP, = | |
| CTA | L | CTG | = | TTA | = | TTG, TTA, | = | |
| | | | | | | CTG | | |
| GAC | D | GGC | D > G | GAT | = | GGT, GAT, | D > G, = | |
| | | | | | | GGC | | |
| GCA | A | GCG | = | GTA | A > V | GTG, GTA, | A > V, = | |
| | | | | | | GCG | | |
| TAC | Y | TGC | Y > C | TAT | = | TGT, TAT, | Y > C, = | |
| | | | | | | TGC | | |
| TCA | S | TCG | = | TTA | S > L | TTG, TTA, | S > L, = | |
| | | | | | | TCG | | |
| AGT | S | AGC | = | AAT | S > N | AAC, AAT, | S > N, = | T > C |
| | | | | | | AGC | | and |
| ATG | M | ACG | M > T | ATA | M > I | ACA, ATA, | M > T, M > I | G > A |
| | | | | | | ACG | | |
| CGT | R | CGC | = | CAT | R > H | CAC, CAT, | R > H, = | |
| | | | | | | CGC | | |
| CTG | L | CCG | L > P | CTA | = | CCA, CTA, | L > P, = | |
| | | | | | | CCG | | |
| GAT | D | GAC | = | AAT | D > N | AAC, AAT, | D > N, = | |
| | | | | | | GAC | | |
| GCT | A | GCC | = | ACT | A > T | ACC, ACT, | A > T, = | |
| | | | | | | GCC | | |
| GGT | G | GGC | = | AAT, AGT, | G > N, | AAC, AGT, | G > N, G > S, | |
| | | | | GAT | G > S, G > D | GGC, GAT, | =, G > D | |
| | | | | | | AAT, AGC, | | |
| | | | | | | GAC | | |
| GTA | V | GCA | V > A | ATA | V > I | [chemical structure] | [chemical structure] | |
| | | | | | | GCA | V > A | |
| GTC | V | GCC | V > A | ATC | V > I | [chemical structure] | [chemical structure] | |
| | | | | | | GCC | V > A | |
| GTG | V | GCG | V > A | ATA, ATG, | V > I, V > M, | [chemical structure] | [chemical structure] | |
| | | | | GTA | = | GCG, GTA, | V > A, =, V > I | |
| | | | | | | [chemical structure] | | |
| | | | | | | GCA | | |
| GTT | V | GCC, GCT, | V > A, = | ATT | V > I | [chemical structure] | [chemical structure] | |
| | | GTC | | | | GCT, GTC | V > A, = | |
| | | | | | | [chemical structure] | | |
| | | | | | | ATC | | |
| TAG | STOP | CAG | STOP > Q | TAA | = | CAA, TAA, | STOP > Q, = | |
| | | | | | | CAG | | |
| TCG | S | CCG | S > P | TCA | = | CCA, TCA, | S > P, = | |
| | | | | | | CCG | | |
| TGA | STOP | CGA | STOP > R | TAA | = | [chemical structure] | [chemical structure] | |
| | | | | | | CGA | STOP > R | |
| TGC | C | CGC | C > R | TAC | C > Y | [chemical structure] | [chemical structure] | |
| | | | | | | CGC | C > R | |
| TGG | W | CGG | W > R | TAA, TAG, | W > STOP | [chemical structure] | [chemical structure] | |
| | | | | TGA | | CGG, TGA, | W > STOP, | |
| | | | | | | [chemical structure] | W > R | |
| | | | | | | CGA | | |
| TGT | C | CGC, CGT, | C > R, = | TAT | C > Y | [chemical structure] | [chemical structure] | |
| | | TGC | | | | CGT, TGC, | C > R, = | |
| | | | | | | [chemical structure] | | |
| | | | | | | TAC | | |
| TTG | L | CCG, CTG, | L > P, = | TTA | = | CCA, TTA, | L > P, = , L > S | |
| | | TCG | L > S | | | CTG, TCG, | | |
| | | | | | | CCG, CTA, | | |
| | | | | | | TCA | | |

WT = wild type;
AA = amino acid.
Bolded = unique codon mutation by SPACE with respect to WT codon.
Bolded and dash-underlined = same as bolded, but also resulting in unique amino acid change with respect to WT codon.
Double underlined = unique amino acid change by SPACE with respect to WT codon

TABLE E
Specific targetable mutations from the ClinVar database that can
be corrected with SPACE using Cas9 proteins with NGG, NGA, NG and AA
PAM recognition.

| | | Reference | Reference | | | |
|---|---|---|---|---|---|---|
| | | proto- | proto- | Reference | | |
| | | spacer and | spacer | proto- | | |
| | | NG[GA]. | and | spacer and | Amino | |
| | Gene | PAM | NG.PAM | NAA.PAM | acid | Associated genetic |
| ClinvarID | type | sequence | sequence | sequence | chage | disease |
| 12750 | TG > | TGGTTCT | TGGTTC | | Q/W | Immunodeficiency |
| | CA | GGCCCT | TGGCCC | | | due to defect in cd3- |
| | | GCTGG | TGCTG | | | zeta |
| 17145 | TG > | | TGTCCC | | Q/W | Intervertebral disc |
| | CA | | GCCTGT | | | disease |
| | | | CCTG | | | |
| 128121 | TG > | | TGAATA | | Q/* | Pre-B-cell acute |
| | CA | | AATAAT | | | lymphoblastic |
| | | | TTTTCG | | | leukemia\|Familial |
| | | | | | | cancer of |
| | | | | | | breast\|Hereditary |
| | | | | | | cancer-predisposing |
| | | | | | | syndrom |
| 128424 | TG > | | | TGTCATT | DI/DV | Familial |
| | CA | | | TATTCTT | | hypercholesterolemias |
| | | | | TCAA | | \|Familial |
| | | | | | | hypercholesteroiemia |
| | | | | | | \|Hypercholesterolemia, |
| | | | | | | autosomal |
| | | | | | | dominant, type |
| | | | | | | B\|Familial |
| | | | | | | hypobetalipoproteinemia |
| | | | | | | \|Hypobetalipoproteinemia, |
| | | | | | | familial, 1 |
| 188253 | TG > | TGTTTCA | TGTTTC | | VV/VI | Hereditary breast |
| | CA | ATGTTTA | AATGTT | | | and ovarian cancer |
| | | AGA | TAAG | | | syndrome not |
| | | | | | | provided |
| 199700 | GGT > | GGTCCA | GGTCCA | | G/S | Thoracic aortic |
| | AGC | GGTGCT | GGTGCT | | | aneurysm and aortic |
| | | GATGG | GATG | | | dissection |
| 220300 | TG > | TGGCGT | TGGCGT | | AG/AS | Hereditary cancer- |
| | CA | CTGTAG | CTGTAG | | | predisposing |
| | | GAAGG | GAAG | | | syndrome Hereditary |
| | | | | | | diffuse gastric |
| | | | | | | cancer |
| 239762 | TG > | | TGCACT | | — | Baller-Gerold |
| | CA | | CACTCT | | | syndrome |
| | | | GGCCT | | | |
| | | | G | | | |
| 240354 | TG > | TGTTTAT | TGTTTA | | NV/NI | Gastrointestinal |
| | CA | GCTTTAA | TGCTTT | | | stroma tumor |
| | | AAGG | AAAAG | | | |
| 240644 | TG > | TGTACCT | TGTACC | | — | Primary dilated |
| | CA | GACTTT | TGACTT | | | cardiomyopathy |
| | | GGAGG | TGGAG | | | |
| 242209 | TG > | TGCCAT | TGCCAT | | A/V | Brugada |
| | CA | GCGCTT | GCGCTT | | | syndrome\|not |
| | | CTCGA | CTCG | | | specified\|Cardiovascular |
| | | | | | | phenotype |
| 251438 | GT > | GTGTGA | GTGTGA | | QC/QR | Familial |
| | AC | CCGGGA | CCGGG | | | hypercholesterolemia |
| | | ATATGA | AATATG | | | |
| 300363 | TG > | | TGTCTT | | TV/TI | Histiocytosis- |
| | CA | | CCTCGT | | | lymphadenopathy |
| | | | GCTCTG | | | plus syndrome |
| 313564 | TG > | TGGGAT | TGGGAT | TGGGAT | W/Q | Emery-Dreifuss |
| | CA | GAAGAA | GAAGAA | GAAGAA | | muscular |
| | | ATAGA | ATAG | ATAGAA | | dystrophy\|Emery- |
| | | | | | | Dreifuss muscular |
| | | | | | | dystrophy 5, |
| | | | | | | autosomal dominant |
| 371798 | TGT > | TGTCGC | TGTCGC | | PV/PT | Mitochondrial |
| | CAC | GAAGGA | GAAGGA | | | complex II |
| | | CCTGG | CCTG | | | deficiency\|Paragang |
| | | | | | | liomas 5 |
| 372212 | TGC > | | TGCCTC | | LP/PS | 3-methylglutaconic |
| | CAT | | TGGGAC | | | aciduria, type VIII |
| | | | GCTCAG | | | |
| 404057 | TG > | TGTGAT | TGTGAT | | C/H | Werner syndrome |
| | CA | GTCAAC | GTCAAC | | | |
| | | AAAAGG | AAAAG | | | |
| 405615 | TG > | | TGAGAG | | S/L | Colorectal cancer, |
| | CA | | CTCAGT | | | susceptibility to, 12 |
| | | | GGAG | | | |
| 406478 | TG > | TGGACA | TGGACA | TGGACA | HG/HR | Long QT syndrome |
| | CA | CACCGT | CACCGT | CACCGT | | |
| | | GGTAAA | GGTAAA | GGTAA | | |
| | | GA | G | | | |
| 410997 | TG > | TGGGAT | TGGGAT | | M/T | Ciliary dyskinesia, |
| | CA | GCCTTG | GCCTTG | | | primary, 28 |
| | | CTTCTGA | CTTCTG | | | |
| 412369 | TG > | TGTCGC | TGTCGC | | PV/PI | Mitochondrial |
| | CA | GAAGGA | GAAGGA | | | complex II |
| | | CCTGG | CCTG | | | deficiency\|Paragang |
| | | | | | | liomas 5 |
| 456874 | TG > | TGCTGC | TGCTGC | | SS/SG | Long QT syndrome |
| | CA | GGGGGG | GGGGG | | | |
| | | ACCTGC | GACCTG | | | |
| | | GG | | | | |
| 464434 | GCCT > | | GCCTG | GCCTGGC | QA/RL | Arrhythmogenic |
| | AGGC | | GCCGA | CGACAGT | | right ventricular |
| | | | CAGTCA | CAA | | cardiomyopathy, |
| | | | AG | | | type 9\|not specified |
| 469582 | TG > | TGGAGG | TGGAG | TGGAGG | GG/GR | Atrial fibrillation, |
| | CA | AGGCGG | GAGGC | AGGCGG | | familial, 7 |
| | | CCAGA | GGCCA | CCAGAA | | |
| | | G | | | | |
| 470429 | TG > | | | TGACAG | DD/DN | Rhabdoid tumor |
| | CA | | | TGAGGA | | predisposition |
| | | | | GGAACA | | syndrome 2 |
| | | | | A | | |
| 472109 | TG > | | TGCGCC | | TA/TT | Myofibrillar |
| | CA | | TGGAGA | | | myopathy, filamin C- |
| | | | CTACAG | | | related\|Myopathy, |
| | | | | | | distal, |
| | | | | | | 4\|Cardiomyopathy, |
| | | | | | | familial hypertrophic, |
| | | | | | | 26\|Dilated |
| | | | | | | Cardiomyopathy, |
| | | | | | | Dominant |
| 476408 | TG > | TGCCTTT | TGCCTT | | GA/GT | Bethlem myopathy 1 |
| | CA | GGACTG | TGGACT | | | |
| | | AAAGG | GAAAG | | | |
| 480118 | GT > | GTACCA | GTACCA | | LY/LH | Hereditary cancer- |
| | AC | GATCCC | GATCCC | | | predisposing |
| | | ACAGA | ACAG | | | syndrome |
| 485859 | GAT > | GATGAA | GATGAA | GATGAA | D/N | Hereditary cancer- |
| | AAC | GCCTTA | GCCTTA | GCCTTA | | predisposing |
| | | AATAAAG | AATAAA | AATAA | | syndrome |
| | | A | G | | | |
| 491715 | GTT > | GTTTATC | GTTTAT | | — | Hereditary cancer- |
| | ATC | AGCAAG | CAGCAA | | | predisposing |
| | | GAGA | GGAG | | | syndrome not |
| | | | | | | specified |
| 529164 | TG > | | TGGCAA | | HG/HS | Netherton syndrome |
| | CA | | CACCTG | | | |
| | | | CTCCAT | | | |
| | | | G | | | |
| 533984 | TG > | TGTGTC | TGTGTC | | T/M | Nemaline myopathy |
| | CA | GTGGAT | GTGGAT | | | 2 |
| | | TGTGG | TGTG | | | |
| 534930 | TG > | TGAGAG | TGAGAG | | LE/LK | Spinal muscular |
| | CA | AGACGC | AGACGC | | | atrophy, distal, |
| | | GGAGG | GGAG | | | autosomal |
| | | | | | | recessive, |
| | | | | | | 1\|Charcot-Marie- |
| | | | | | | Tooth disease, |
| | | | | | | axonal, type 2S |
| 535289 | GT > | GTTGGA | GTTGGA | GTTGGA | T/V | Limb-girdle |
| | AC | CGACCT | CGACCT | CGACCT | | muscular dystrophy, |
| | | TTGAATG | TTGAAT | TTGAA | | type 2J\|Dilated |
| | | G | G | | | cardiomyopathy 1G |
| 536518 | TG > | | TGAGGC | | TE/TK | Limb-girdle |
| | CA | | | TGGGGG | | muscular dystrophy, |
| | | | | TGGAA | | type 2A |
| 541194 | GT > | GTCCTA | GTCCTA | | - | Myasthenic |
| | AC | GACCAG | GACCAG | | | syndrome, |
| | | TGCCCG | TGCCCG | | | congenital, 8 |
| | | G | | | | |
| 566099 | TG > | TGGGAA | TGGGAA | | AG/AR | Colorectal cancer 10 |
| | CA | ATACGC | ATACGC | | | |
| | | CCTGA | CCTG | | | |
| 571908 | TG > | TGCTTA | TGCTTA | | SI/SV | Nemaline myopathy |
| | CA | GTGCAC | GTGCAC | | | 2 |
| | | TGGCAG | TGGCAG | | | |
| | | A | | | | |
| 576182 | TCG > | | TCGGCT | | R/W | Rigidity and |
| | CCA | | CGCCG | | | multifocal seizure |
| | | | CCTGCA | | | syndrome, lethal |
| | | | G | | | neonatal |
| 576750 | TG > | TGCCCT | TGCCCT | | A/V | Colorectal cancer, |
| | CA | GCGCTG | GCGCT | | | susceptibility to, 12 |
| | | TGAGG | GTGAG | | | |
| 627700 | TG > | TGGATTT | TGGATT | | P/L | Hereditary cancer- |
| | CA | CTGGAA | TCTGGA | | | predisposing |
| | | GTAGA | AGTAG | | | syndrome |
| 628274 | GGT > | GGTTCTT | GGTTCT | | EP/EL | Hereditary cancer- |
| | AGC | GGTCCT | TGGTCC | | | predisposing |
| | | CAGG | TCAG | | | syndrome |
| 630535 | GT > | | | GTGTCT | T/V | Hereditary cancer- |
| | AC | | | GGGATG | | predisposing |
| | | | | CTGAA | | syndrome |
| 647607 | GT > | | GTGCCT | | R/H | Ehlers-Danlos |
| | AC | | GCCCC | | | syndrome progeroid |
| | | | CCAGAG | | | type |
| 647708 | TG > | | TGGCAA | | SG/SS | Long QT syndrome |
| | CA | | GTGCAA | | | |
| | | | CGTG | | | |
| 652124 | TG > | TGTGGA | TGTGGA | | C/H | Myofibrillar |
| | CA | CAGGTG | CAGGTG | | | myopathy, BAG3- |
| | | GCAGCG | GCAG | | | related Dilated |
| | | G | | | | cardiomyopathy |
| | | | | | | 1HH |
| 653067 | TG > | TGCTCC | TGCTCC | | DA/DT | Hereditary |
| | CA | TGTGCT | TGTGCT | | | pancreatitis |
| | | GAGCCA | GAGCCA | | | |
| | | GG | G | | | |
| 657209 | TG > | TGTTGCT | TGTTGC | | RV/RI | Neuropathy, |
| | CA | ATTGAAC | TATTGA | | | hereditary sensory, |
| | | ACCTGG | ACACCT | | | with spastic |
| | | | G | | | paraplegia, |
| | | | | | | autosomal recessive |
| 660313 | TG > | | TGCAGA | | GA/GT | Chromosome 9q |
| | CA | | GCAGG | | | deletion syndrome |
| | | | CGGCC | | | |
| | | | G | | | |
| 662382 | TG > | TGTTCTG | TGTTCT | | AV/AI | Renal hamartomas |
| | CA | GTCAAG | GGTCAA | | | nephroblasto- |
| | | GTGA | GGTG | | | matosis and fetal |
| | | | | | | gigantism |

TABLE F
Specific targetable MNV mutations from the gnomAD database that can
be modelled with SPACE using Cas9 proteins with NGG PAM recognition.

| Gene_name | MNV | MNV_codons | MNV_AAs | MNV_category |
|---|---|---|---|---|
| C1orf170 | 1-911594-CA-TG | gTG/gCA | V/A | Unchanged |
| C1orf170 | 1-915225-CAA-TAG | TtG/CtA | L | Unchanged |
| ARHGEF16 | 1-3383896-CCA-TCG | CcA/TcG | P/S | Unchanged |
| ARHGEF16 | 1-3383897-CA-TG | cCA/cTG | P/L | Unchanged |
| CHD5 | 1-6184090-CGA-TGG | TcG/CcA | S/P | Unchanged |
| SLC45A1 | 1-8390494-CA-TG | cCA/cTG | P/L | Unchanged |
| H6PD | 1-9324669-CA-TG | tCA/tTG | S/L | Unchanged |
| PEX14 | 1-10689923-AC-GT | gAC/gGT | D/G | Unchanged |
| PRAMEF1 | 1-12855598-AC-TG | aAC/aTG | N/M | Changed missense |
| PRAMEF2 | 1-12921087-AC-TG | aAC/aTG | N/M | Changed missense |
| PRAMEF4 | 1-12942989-CA-TG | TGt/CAt | C/H | Changed missense |
| PRDM2 | 1-14143002-CA-TG | cCA/cTG | P/L | Unchanged |
| ARHGEF10L | 1-18023364-AC-GT | aAC/aGT | N/S | Unchanged |
| UBR4 | 1-19433449-AAC-GAT | GtT/AtC | V/I | Unchanged |
| EMC1 | 1-19566381-CA-TG | tTG/tCA | L/S | Unchanged |
| AKR7A3 | 1-19612476-AC-GT | GTg/ACg | V/T | Changed missense |
| STPG1 | 1-24710404-CA-TG | aTG/aCA | M/T | Partially changed missense |
| GRIK3 | 1-37267555-AC-GT | GTc/ACc | V/T | Changed missense |
| NFYC | 1-41204567-AGC-GGT | AgC/GgT | S/G | Unchanged |
| HIVEP3 | 1-42046527-CA-GT | aTG/aAC | M/N | Changed missense |
| GUCA2B | 1-42619138-CA-TG | gCA/gTG | A/V | Unchanged |
| FOXJ3 | 1-42693596-CA-TG | gTG/gCA | V/A | Unchanged |
| AKR1A1 | 1-46027527-AC-GT | ACc/GTc | T/V | Changed missense |
| MAST2 | 1-46500882-AC-GT | aAC/aGT | N/S | Unchanged |
| SLC1A7 | 1-53558270-AC-GT | cGT/cAC | R/H | Unchanged |
| MROH7 | 1-55119143-CA-TG | CAt/TGt | H/C | Changed missense |
| MROH7-TTC4 | 1-55119143-CA-TG | CAt/TGt | H/C | Changed missense |
| MROH7-TTC4 | 1-55139740-CA-TG | CAc/TGc | H/C | Changed missense |
| MROH7 | 1-55139740-CA-TG | CAc/TGc | H/C | Changed missense |
| KANK4 | 1-62728783-CA-TG | gTG/gCA | V/A | Unchanged |
| KANK4 | 1-62728784-AC-GT | GTg/ACg | V/T | Changed missense |
| ATP5F1 | 1-112002206-AC-GT | cAC/cGT | H/R | Unchanged |
| PPM1J | 1-113255388-AC-GT | GTt/ACt | V/T | Changed missense |
| PTPN22 | 1-114377567-CA-TG | TGg/CAg | W/Q | Rescued nonsense |
| NBPF16 | 1-148756446-AC-GT | aAC/aGT | N/S | Unchanged |
| SNX27 | 1-151634729-AC-GT | ACa/GTa | T/V | Changed missense |
| HRNR | 1-152190349-CA-TG | tTG/tCA | L/S | Unchanged |
| FLG | 1-152283333-CA-TG | gTG/gCA | V/A | Unchanged |
| FLG | 1-152286385-CA-TG | TGg/CAg | W/Q | Rescued nonsense |
| LCE1E | 1-152760074-CA-TG | tCA/tTG | S/L | Unchanged |
| LOR | 1-153233510-AGC-GGT | AgC/GgT | S/G | Unchanged |
| HCN3 | 1-155247394-CA-GT | CAg/GTg | Q/V | Changed missense |
| GON4L | 1-155735584-AC-TG | GTg/CAg | V/Q | Changed missense |
| GON4L | 1-155736381-CA-TG | tTG/tCA | L/S | Unchanged |
| FCRL5 | 1-157509024-AC-GT | gGT/gAC | G/D | Unchanged |
| ATP1A4 | 1-160141195-AC-GT | tAC/tGT | Y/C | Unchanged |
| POGK | 1-166818565-CA-TG | gCA/gTG | A/V | Unchanged |
| ADCY10 | 1-167849414-ACC-GCT | GgT/AgC | G/S | Unchanged |
| XCL1 | 1-168550337-CA-TG | aCA/aTG | T/M | Changed missense |
| KIAA1614 | 1-180913597-AAC-GAT | AaC/GaT | N/D | Unchanged |
| SMG7 | 1-183510142-AC-GT | cAC/cGT | H/R | Unchanged |
| FAM129A | 1-184765071-CA-TG | cTG/cCA | L/P | Unchanged |
| CFHR1 | 1-196797356-CA-TG | aCA/aTG | T/M | Changed missense |
| DSTYK | 1-205130412-CA-TG | TGt/CAt | C/H | Changed missense |
| CR1 | 1-207753620-CA-TG | CAt/TGt | H/C | Changed missense |
| CAMK1G | 1-209782342-CA-TG | cCA/cTG | P/L | Unchanged |
| TRAF5 | 1-211533351-CA-TG | gCA/gTG | A/V | Unchanged |
| FAM71A | 1-212799870-AAC-GAT | AaC/GaT | N/D | Unchanged |
| HHIPL2 | 1-222721288-CA-TG | tTG/tCA | L/S | Unchanged |
| OBSCN | 1-228402120-CA-TG | CAg/TGg | Q/W | Rescued nonsense |
| OBSCN | 1-228433216-CA-TG | aCA/aTG | T/M | Changed missense |
| OBSCN | 1-228465346-AAC-GAT | AaC/GaT | N/D | Unchanged |
| OBSCN | 1-228503676-CA-TG | CAc/TGc | H/C | Changed missense |
| OBSCN | 1-228503677-AC-GT | cAC/cGT | H/R | Unchanged |
| OBSCN | 1-228560138-CA-TG | tCA/tTG | S/L | Unchanged |
| HEATR1 | 1-236716959-CGA-TGG | TcG/CcA | S/P | Unchanged |
| MTR | 1-237054568-CA-TG | gCA/gTG | A/V | Unchanged |
| OR2L8 | 1-248112835-CA-TG | CAc/TGc | H/C | Changed missense |
| OR2T33 | 1-248436616-AC-GT | tGT/tAC | C/Y | Unchanged |
| OR2T3 | 1-248637064-CA-TG | cCA/cTG | P/L | Unchanged |
| OR2T11 | 1-248790074-CA-TG | TGc/CAc | C/H | Changed missense |
| AKR1C1 | 10-5010571-CA-TG | aCA/aTG | T/M | Changed missense |
| ECHDC3 | 10-11805353-CA-TG | gCA/gTG | A/V | Unchanged |
| ITGA8 | 10-15573050-AC-GT | GTa/ACa | V/T | Changed missense |
| PTER | 10-16547056-CAA-TAG | CaA/TaG | Q/* | Unchanged |
| CUBN | 10-16918972-AGC-GGT | GcT/AcC | A/T | Unchanged |
| EBLN1 | 10-22498208-CA-TG | aTG/aCA | M/T | Partially changed missense |
| KIAA1217 | 10-24762464-CA-TG | gCA/gTG | A/V | Unchanged |
| UNC5B | 10-73056495-CA-TG | gCA/gTG | A/V | Unchanged |
| RPS24 | 10-79814598-CA-TG | CAc/TGc | H/C | Changed missense |
| SFTPD | 10-81706323-CA-TG | aTG/aCA | M/T | Partially changed missense |
| CDHR1 | 10-85960394-CA-TG | gCA/gTG | A/V | Unchanged |
| CEP55 | 10-95262981-AC-GT | ACa/GTa | T/V | Changed missense |
| PYROXD2 | 10-100148175-CA-TG | aTG/aCA | M/T | Partially changed missense |
| HPS1 | 10-100202987-AC-GT | GTc/ACc | V/T | Changed missense |
| NRAP | 10-115411613-CA-TG | gTG/gCA | V/A | Unchanged |
| NRAP | 10-115411614-AC-GT | GTg/ACg | V/T | Changed missense |
| DMBT1 | 10-124358455-CA-TG | tCA/tTG | S/L | Unchanged |
| AL450307.1 | 10-133608209-CA-TG | TGc/CAc | C/H | Changed missense |
| STK32C | 10-134036193-AC-GT | cGT/cAC | R/H | Unchanged |
| SPRN | 10-135237060-AC-GT | gGT/gAC | G/D | Unchanged |
| CYP2E1 | 10-135342049-AC-TG | cAC/cTG | H/L | Partially changed missense |
| PSMD13 | 11-244166-AC-GT | aAC/aGT | N/S | Unchanged |
| ATHL1 | 11-290815-CA-TG | gCA/gTG | A/V | Unchanged |
| ANO9 | 11-428384-CA-TG | TGc/CAc | C/H | Changed missense |
| MUC2 | 11-1075678-AC-GT | aAC/aGT | N/S | Unchanged |
| MUC5B | 11-1264361-CA-TG | aCA/aTG | T/M | Changed missense |
| MOB2 | 11-1507730-CA-TG | cTG/cCA | L/P | Unchanged |
| OR51B2 | 11-5345169-CA-TG | TGt/CAt | C/H | Changed missense |
| OR51B5 | 11-5364692-AGC-GGT | GcT/AcC | A/T | Unchanged |
| OR52D1 | 11-5510283-CA-TG | tCA/tTG | S/L | Unchanged |
| OR52H1 | 11-5566029-CA-TG | TGc/CAc | C/H | Changed missense |
| OR52L1 | 11-6007271-CA-TG | TGg/CAg | W/Q | Rescued nonsense |
| OR2AG2 | 11-6789256-CA-TG | cTG/cCA | L/P | Unchanged |
| OR2AG1 | 11-6807200-CA-TG | cCA/cTG | P/L | Unchanged |
| ZNF214 | 11-7022159-CA-TG | TGt/CAt | C/H | Changed missense |
| SWAP70 | 11-9754220-AC-GT | aAC/aGT | N/S | Unchanged |
| MRGPRX3 | 11-18159119-ATC-GTT | AtC/GtT | I/V | Unchanged |
| MRGPRX4 | 11-18195722-CA-TG | CAg/TGg | Q/W | Rescued nonsense |
| SAA2 | 11-18267026-AC-GT | cGT/cAC | R/H | Unchanged |
| RAG1 | 11-36597733-CA-TG | gCA/gTG | A/V | Unchanged |
| C11orf96 | 11-43946967-AC-GT | ACg/GTg | T/V | Changed missense |
| DGKZ | 11-46387867-CA-TG | CAg/TGg | Q/W | Rescued nonsense |
| DGKZ | 11-46397675-CA-GT | CAc/GTc | H/V | Changed missense |
| TRIM64C | 11-49080503-CA-TG | tTG/tCA | L/S | Unchanged |
| OR4C16 | 11-55339829-AC-GT | ACc/GTc | T/V | Changed missense |
| OR4C16 | 11-55339829-ACC-GCT | AcC/GcT | T/A | Unchanged |
| OR5L1 | 11-55579340-CA-TG | aCA/aTG | T/M | Changed missense |
| OR5R1 | 11-56185344-CA-TG | TGc/CAc | C/H | Changed missense |
| OR4D10 | 11-59245494-CTA-TTG | CtA/TtG | L | Unchanged |
| MS4A4A | 11-60059738-CA-TG | CAg/TGg | Q/W | Rescued nonsense |
| CD5 | 11-60892605-CA-TG | CAc/TGc | H/C | Changed missense |
| NUDT22 | 11-63997328-CA-TG | CAg/TGg | Q/W | Rescued nonsense |
| SLC22A12 | 11-64367324-CA-TG | gCA/gTG | A/V | Unchanged |
| PCNXL3 | 11-65385605-CA-TG | CAg/TGg | Q/W | Rescued nonsense |
| SPTBN2 | 11-66468468-CA-TG | gTG/gCA | V/A | Unchanged |
| TBC1D10C | 11-67176897-CA-TG | tCA/tTG | S/L | Unchanged |
| GPR152 | 11-67218909-AGC-GGT | GcT/AcC | A/T | Unchanged |
| AIP | 11-67258390-CA-TG | CAg/TGg | Q/W | Rescued nonsense |
| ALDH3B2 | 11-67434160-CA-TG | aTG/aCA | M/T | Partially changed missense |
| ANO1 | 11-70007391-CA-TG | gCA/gTG | A/V | Unchanged |
| DEFB108B | 11-71548543-CA-TG | CAa/TGa | Q/* | Unchanged |
| KDM4E | 11-94759058-CA-TG | CAg/TGg | Q/W | Rescued nonsense |
| EXPH5 | 11-108383675-CA-TG | cTG/cCA | L/P | Unchanged |
| ZC3H12C | 11-110035260-CGA-TGG | CgA/TgG | R/W | Rescued nonsense |
| LAYN | 11-111420363-CA-TG | cCA/cTG | P/L | Unchanged |
| BUD13 | 11-116627892-CA-TG | TGg/CAg | W/Q | Rescued nonsense |
| BACE1 | 11-117160346-CA-TG | TGc/CAc | C/H | Changed missense |
| CEP164 | 11-117267883-CA-TG | CAg/TGg | Q/W | Rescued nonsense |
| AMICA1 | 11-118074337-AC-GT | GTg/ACg | V/T | Changed missense |
| TMEM25 | 11-118405067-CA-TG | CAa/TGa | Q/* | Unchanged |
| BCL9L | 11-118771746-CA-TG | gTG/gCA | V/A | Unchanged |
| VPS11 | 11-118947633-AC-GT | tAC/tGT | Y/C | Unchanged |
| TECTA | 11-120996291-CA-TG | gCA/gTG | A/V | Unchanged |
| UBASH3B | 11-122665436-CA-TG | tCA/tTG | S/L | Unchanged |
| OR6T1 | 11-123814489-AC-GT | aGT/aAC | S/N | Unchanged |
| OR10G4 | 11-123886319-CA-TG | aCA/aTG | T/M | Changed missense |
| ST14 | 11-130066334-AC-GT | aAC/aGT | N/S | Unchanged |
| TULP3 | 12-3046801-CA-TG | aCA/aTG | T/M | Changed missense |
| ANO2 | 12-6030404-CA-TG | gTG/gCA | V/A | Unchanged |
| CD163L1 | 12-7527123-CA-TG | aTG/aCA | M/T | Partially changed missense |
| SMCO2 | 12-27648785-CA-TG | gCA/gTG | A/V | Unchanged |
| CCDC65 | 12-49308283-CA-TG | CAc/TGc | H/C | Changed missense |
| CERS5 | 12-50537814-CA-TG | TGt/CAt | C/H | Changed missense |
| ANKRD33 | 12-52284499-CA-TG | CAg/TGg | Q/W | Rescued nonsense |
| OR10P1 | 12-56031610-CA-TG | tCA/tTG | S/L | Unchanged |
| ARHGEF25 | 12-58010162-CA-TG | CAg/TGg | Q/W | Rescued nonsense |
| PTPRB | 12-70928724-ATC-GTT | GaT/AaC | D/N | Unchanged |
| TRHDE | 12-73014916-CA-TG | aCA/aTG | T/M | Changed missense |
| MYO1H | 12-109853348-CA-TG | cCA/cTG | P/L | Unchanged |
| HVCN1 | 12-111099002-CA-TG | aTG/aCA | M/T | Partially changed missense |
| DTX1 | 12-113532615-CGA-TGG | CgA/TgG | R/W | Rescued nonsense |
| GTF2H3 | 12-124144394-CA-TG | cCA/cTG | P/L | Unchanged |
| DNAH10 | 12-124387585-CA-TG | gCA/gTG | A/V | Unchanged |
| SCARB1 | 12-125284748-AGC-GGT | GcT/AcC | A/T | Unchanged |
| EP400 | 12-132528770-AC-GT | ACc/GTc | T/V | Changed missense |
| EP400 | 12-132528770-ACC-GCT | AcC/GcT | T/A | Unchanged |
| TNFRSF19 | 13-24234516-CA-TG | tCA/tTG | S/L | Unchanged |
| C1QTNF9B | 13-24465716-CA-TG | gTG/gCA | V/A | Unchanged |
| C1QTNF9B | 13-24468328-CA-TG | TGt/CAt | C/H | Changed missense |
| ATP12A | 13-25265102-CA-TG | gCA/gTG | A/V | Unchanged |
| RNF17 | 13-25419175-CA-TG | aCA/aTG | T/M | Changed missense |
| SLC46A3 | 13-29287551-AC-GT | GTt/ACt | V/T | Changed missense |
| FRY | 13-32676113-CA-TG | aCA/aTG | T/M | Changed missense |
| TMTC4 | 13-101287339-AC-GT | GTt/ACt | V/T | Changed missense |
| PROZ | 13-113818899-CA-TG | aCA/aTG | T/M | Changed missense |
| CDC16 | 13-115016035-CA-TG | aCA/aTG | T/M | Changed missense |
| TRAV27 | 14-22616546-CA-TG | gCA/gTG | A/V | Unchanged |
| TRAV36DV7 | 14-22695128-ATC-GTT | AtC/GtT | I/V | Unchanged |
| AE000662.92 | 14-23026575-AAC-GAT | AaC/GaT | N/D | Unchanged |
| SLC8A3 | 14-70634087-AC-GT | cGT/cAC | R/H | Unchanged |
| ADAM21 | 14-70924566-CA-GT | gCA/gGT | A/G | Unchanged |
| TMEM63C | 14-77703056-CA-TG | gCA/gTG | A/V | Unchanged |
| BDKRB2 | 14-96707456-CA-TG | aCA/aTG | T/M | Changed missense |
| KIF26A | 14-104643408-CA-TG | gCA/gTG | A/V | Unchanged |
| KIF26A | 14-104643857-CGA-TGG | CgA/TgG | R/W | Rescued nonsense |
| AHNAK2 | 14-105410775-ATC-GTT | GaT/AaC | D/N | Unchanged |
| AHNAK2 | 14-105411162-CA-TG | cTG/cCA | L/P | Unchanged |
| AHNAK2 | 14-105414474-CA-TG | aTG/aCA | M/T | Partially changed missense |
| AHNAK2 | 14-105414979-AC-GT | GTg/ACg | V/T | Changed missense |
| AHNAK2 | 14-105415122-CA-TG | cTG/cCA | L/P | Unchanged |
| AHNAK2 | 14-105415473-CA-TG | gTG/gCA | V/A | Unchanged |
| AHNAK2 | 14-105415515-CA-TG | gTG/gCA | V/A | Unchanged |
| AHNAK2 | 14-105415516-AC-GT | GTg/ACg | V/T | Changed missense |
| AHNAK2 | 14-105416454-CA-TG | aTG/aCA | M/T | Partially changed missense |
| AHNAK2 | 14-105416505-CA-TG | aTG/aCA | M/T | Partially changed missense |
| AHNAK2 | 14-105416958-CA-TG | gTG/gCA | V/A | Unchanged |
| AHNAK2 | 14-105416959-AC-GT | GTg/ACg | V/T | Changed missense |
| AHNAK2 | 14-105417957-ACC-GCT | GgT/AgC | G/S | Unchanged |
| AHNAK2 | 14-105419736-CA-TG | tTG/tCA | L/S | Unchanged |
| IGHV1-3 | 14-106471267-CA-TG | aTG/aCA | M/T | Partially changed missense |
| IGHV3-9 | 14-106552480-CA-TG | aTG/aCA | M/T | Partially changed missense |
| IGHV3-53 | 14-107049101-CA-TG | TGg/CAg | W/Q | Rescued nonsense |
| IGHV4-61 | 14-107095378-CGA-TGG | TcG/CcA | S/P | Unchanged |
| GOLGA8T | 15-30434160-CA-TG | CAg/TGg | Q/W | Rescued nonsense |
| GOLGA8K | 15-32686364-CA-TG | cTG/cCA | L/P | Unchanged |
| THBS1 | 15-39880822-AC-GT | ACa/GTa | T/V | Changed missense |
| DUOX2 | 15-45388098-CA-TG | gTG/gCA | V/A | Unchanged |
| DUOX1 | 15-45444517-CA-TG | aCA/aTG | T/M | Changed missense |
| MYO5C | 15-52531939-CAA-TAG | TtG/CtA | L | Unchanged |
| PIF1 | 15-65113686-CA-TG | TGt/CAt | C/H | Changed missense |
| KIF23 | 15-69728947-CCA-TCG | CcA/TcG | P/S | Unchanged |
| KIF23 | 15-69728948-CA-TG | cCA/cTG | P/L | Unchanged |
| ZNF592 | 15-85345509-CA-TG | cCA/cTG | P/L | Unchanged |
| SLC28A1 | 15-85478408-CAA-TAG | CaA/TaG | Q/* | Unchanged |
| KIF7 | 15-90174789-CGA-TGG | TcG/CcA | S/P | Unchanged |
| UNC45A | 15-91489918-CA-TG | cCA/cTG | P/L | Unchanged |
| FAM169B | 15-98995079-CGA-TGG | TcG/CcA | S/P | Unchanged |
| ADAMTS17 | 15-100692844-CA-TG | aTG/aCA | M/T | Partially changed missense |
| LRRK1 | 15-101598312-ACC-GCT | AcC/GcT | T/A | Unchanged |
| CAPN15 | 16-603470-CA-TG | cCA/cTG | P/L | Unchanged |
| PIGQ | 16-624114-AC-GT | ACg/GTg | T/V | Changed missense |
| WDR90 | 16-711904-CA-TG | cCA/cTG | P/L | Unchanged |
| CACNA1H | 16-1261218-CA-TG | tCA/tTG | S/L | Unchanged |
| CCDC154 | 16-1488646-AC-GT | cGT/cAC | R/H | Unchanged |
| ZNF598 | 16-2049002-CA-GT | TGt/ACt | C/T | Changed missense |
| MEFV | 16-3297073-ATC-GTT | GaT/AaC | D/N | Unchanged |
| OR2C1 | 16-3405993-CA-TG | tCA/tTG | S/L | Unchanged |
| C16orf71 | 16-4796392-CA-TG | CAg/TGg | Q/W | Rescued nonsense |
| TNFRSF17 | 16-12060163-AC-GT | aAC/aGT | N/S | Unchanged |
| EEF2K | 16-22269866-CA-TG | CAa/TGa | Q/* | Unchanged |
| NPIPB6 | 16-28354498-CA-TG | gTG/gCA | V/A | Unchanged |
| APOBR | 16-28508446-CA-TG | gCA/gTG | A/V | Unchanged |
| CTB-134H23.2 | 16-29057391-CA-TG | CAg/TGg | Q/W | Rescued nonsense |
| QPRT | 16-29708350-AC-GT | ACt/GTt | T/V | Changed missense |
| TAOK2 | 16-29998199-CA-TG | aCA/aTG | T/M | Changed missense |
| CNGB1 | 16-57957215-CA-TG | gTG/gCA | V/A | Unchanged |
| NDRG4 | 16-58545425-CA-TG | tCA/tTG | S/L | Unchanged |
| BCAR1 | 16-75269267-AGC-GGT | GcT/AcC | A/T | Unchanged |
| CNTNAP4 | 16-76532582-CA-TG | CAg/TGg | Q/W | Rescued nonsense |
| OSGIN1 | 16-83999032-CA-TG | tCA/tTG | S/L | Unchanged |
| ZNF469 | 16-88505634-CA-TG | cCA/cTG | P/L | Unchanged |
| RP11-368I7.4 | 16-89751860-CA-TG | TGc/CAc | C/H | Changed missense |
| MC1R | 16-89986607-CA-TG | aCA/aTG | T/M | Changed missense |
| TUBB3 | 16-89986607-CA-TG | aCA/aTG | T/M | Changed missense |
| DEF8 | 16-90020745-CA-GT | CAg/GTg | Q/V | Changed missense |
| GAS8 | 16-90109710-CA-TG | aCA/aTG | T/M | Changed missense |
| MYO1C | 17-1384066-AC-GT | gGT/gAC | G/D | Unchanged |
| MYO1C | 17-1384066-ACC-GCT | GgT/AgC | G/S | Unchanged |
| WDR81 | 17-1637073-CA-TG | cCA/cTG | P/L | Unchanged |
| OR1E2 | 17-3337056-CA-TG | TGc/CAc | C/H | Changed missense |
| ZZEF1 | 17-3981289-CA-TG | gTG/gCA | V/A | Unchanged |
| KIF1C | 17-4926881-CA-TG | cCA/cTG | P/L | Unchanged |
| ACAP1 | 17-7245370-CA-TG | cCA/cTG | P/L | Unchanged |
| AURKB | 17-8108330-CA-TG | aTG/aCA | M/T | Partially changed missense |
| DNAH9 | 17-11523081-CA-TG | CAa/TGa | Q/* | Unchanged |
| DNAH9 | 17-11648331-AC-GT | aAC/aGT | N/S | Unchanged |
| TBC1D26 | 17-15640814-CA-TG | CAc/TGc | H/C | Changed missense |
| TBC1D26 | 17-15640815-AC-GT | cAC/cGT | H/R | Unchanged |
| CCDC144A | 17-16593796-AGC-GGT | AgC/GgT | S/G | Unchanged |
| RP11-219A15.1 | 17-16593796-AGC-GGT | AgC/GgT | S/G | Unchanged |
| LLGL1 | 17-18137141-AGC-GGT | AgC/GgT | S/G | Unchanged |
| LGALS9 | 17-25975991-AC-TG | ACc/TGc | T/C | Changed missense |
| SEZ6 | 17-27284442-CA-TG | aTG/aCA | M/T | Partially changed missense |
| ANKRD13B | 17-27938606-CA-GT | aCA/aGT | T/S | Changed missense |
| LRRC37A | 17-44374709-CA-TG | cCA/cTG | P/L | Unchanged |
| TUBD1 | 17-57963536-CA-TG | aTG/aCA | M/T | Partially changed missense |
| TLK2 | 17-60683502-CA-TG | cCA/cTG | P/L | Unchanged |
| ACE | 17-61564051-CA-TG | gCA/gTG | A/V | Unchanged |
| APOH | 17-64216814-AC-GT | cGT/cAC | R/H | Unchanged |
| SLC16A6 | 17-66267530-CA-TG | cTG/cCA | L/P | Unchanged |
| ARSG | 17-66391231-CA-TG | cCA/cTG | P/L | Unchanged |
| COG1 | 17-71192872-CA-TG | gCA/gTG | A/V | Unchanged |
| ST6GALNAC1 | 17-74625685-CA-TG | gTG/gCA | V/A | Unchanged |
| ENGASE | 17-77078107-CGA-TGG | CgA/TgG | R/W | Rescued nonsense |
| RP11-1055B8.7 | 17-79409309-AC-GT | ACg/GTg | T/V | Changed missense |
| RP11-1055B8.7 | 17-79414307-ACC-GCT | AcC/GcT | T/A | Unchanged |
| CCDC57 | 17-80159713-CA-TG | cTG/cCA | L/P | Unchanged |
| HEXDC | 17-80391684-ATC-GTT | AtC/GtT | I/V | Unchanged |
| METRNL | 17-81043037-CCA-TCG | CcA/TcG | P/S | Unchanged |
| METRNL | 17-81043038-CA-TG | cCA/cTG | P/L | Unchanged |
| SMCHD1 | 18-2750476-CA-TG | gCA/gTG | A/V | Unchanged |
| TGIF1 | 18-3457538-CA-TG | cCA/cTG | P/L | Unchanged |
| SOGA2 | 18-8784611-CA-TG | CAg/TGg | Q/W | Rescued nonsense |
| NPC1 | 18-21124945-CA-GT | aTG/aAC | M/N | Changed missense |
| DSG2 | 18-29125853-CA-TG | aCA/aTG | T/M | Changed missense |
| MOCOS | 18-33780019-CA-TG | CAc/TGc | H/C | Changed missense |
| SLC14A1 | 18-43316537-CA-TG | cCA/cTG | P/L | Unchanged |
| SERPINB3 | 18-61325815-AC-GT | GTt/ACt | V/T | Changed missense |
| DOK6 | 18-67365667-CA-TG | aCA/aTG | T/M | Changed missense |
| ODF3L2 | 19-464309-CA-TG | gTG/gCA | V/A | Unchanged |
| GZMM | 19-548573-CA-GT | CAc/GTc | H/V | Changed missense |
| HMHA1 | 19-1085965-CA-TG | aCA/aTG | T/M | Changed missense |
| BTBD2 | 19-1997363-AGC-GGT | GcT/AcC | A/T | Unchanged |
| ZNF554 | 19-2834372-AC-GT | tAC/tGT | Y/C | Unchanged |
| APBA3 | 19-3752873-CA-TG | TGc/CAc | C/H | Changed missense |
| PIAS4 | 19-4029011-AC-GT | cAC/cGT | H/R | Unchanged |
| PLIN4 | 19-4511677-AGC-GGT | GcT/AcC | A/T | Unchanged |
| PLIN5 | 19-4525045-CA-TG | TGc/CAc | C/H | Changed missense |
| EMR1 | 19-6913706-AC-GT | ACg/GTg | T/V | Changed missense |
| CTD-2207O23.3 | 19-7528733-CA-TG | CAg/TGg | Q/W | Rescued nonsense |
| ARHGEF18 | 19-7528733-CA-TG | CAg/TGg | Q/W | Rescued nonsense |
| CTD-3193O13.9 | 19-7935583-CA-TG | tTG/tCA | L/S | Unchanged |
| CTD-3193O13.9 | 19-7936006-CA-TG | aTG/aCA | M/T | Partially changed missense |
| ACTL9 | 19-8808899-CA-TG | gTG/gCA | V/A | Unchanged |
| RAVER1 | 19-10439711-AC-GT | cGT/cAC | R/H | Unchanged |
| RGL3 | 19-11529440-AC-GT | gGT/gAC | G/D | Unchanged |
| ZNF440 | 19-11942362-AC-GT | aAC/aGT | N/S | Unchanged |
| MAST1 | 19-12985575-CA-TG | tCA/tTG | S/L | Unchanged |
| CYP4F11 | 19-16034713-CA-TG | TGc/CAc | C/H | Changed missense |
| CPAMD8 | 19-17111296-CA-TG | aTG/aCA | M/T | Partially changed missense |
| MYO9B | 19-17283655-ATC-GTT | AtC/GtT | I/V | Unchanged |
| MYO9B | 19-17316955-CA-TG | CAg/TGg | Q/W | Rescued nonsense |
| ANKLE1 | 19-17395002-CA-TG | CAg/TGg | Q/W | Rescued nonsense |
| TMEM221 | 19-17547291-CA-TG | aTG/aCA | M/T | Partially changed missense |
| MAP1S | 19-17837980-CA-TG | gCA/gTG | A/V | Unchanged |
| IFI30 | 19-18288067-CCA-TCG | CcA/TcG | P/S | Unchanged |
| KIAA1683 | 19-18378218-CA-TG | cTG/cCA | L/P | Unchanged |
| ATP4A | 19-36050968-CA-TG | gTG/gCA | V/A | Unchanged |
| ATP4A | 19-36050969-AC-GT | GTg/ACg | V/T | Changed missense |
| ZNF567 | 19-37210804-AC-GT | tAC/tGT | Y/C | Unchanged |
| RASGRP4 | 19-38905683-AC-GT | gGT/gAC | G/D | Unchanged |
| RYR1 | 19-38993546-AC-GT | cAC/cGT | H/R | Unchanged |
| IFNL4 | 19-39739170-CA-TG | TGc/CAc | C/H | Changed missense |
| SHKBP1 | 19-41096188-CA-TG | aCA/aTG | T/M | Changed missense |
| CYP2A6 | 19-41351304-CA-TG | aTG/aCA | M/T | Partially changed missense |
| CYP2A7 | 19-41383200-CA-TG | aTG/aCA | M/T | Partially changed missense |
| CYP2F1 | 19-41633926-CA-TG | cCA/cTG | P/L | Unchanged |
| AXL | 19-41743861-AAC-GAT | AaC/GaT | N/D | Unchanged |
| PSG11 | 19-43529025-AC-GT | GTa/ACa | V/T | Changed missense |
| TEX101 | 19-43922060-CA-TG | cCA/cTG | P/L | Unchanged |
| ZNF285 | 19-44891838-CA-TG | TGt/CAt | C/H | Changed missense |
| PVRL2 | 19-45389223-CA-TG | cCA/cTG | P/L | Unchanged |
| HIF3A | 19-46823701-CA-TG | CAg/TGg | Q/W | Rescued nonsense |
| GLTSCR2 | 19-48255803-CA-TG | gCA/gTG | A/V | Unchanged |
| GRIN2D | 19-48946404-CA-TG | cCA/cTG | P/L | Unchanged |
| KLK1 | 19-51323501-ATC-GTT | GaT/AaC | D/N | Unchanged |
| KLK3 | 19-51359502-CA-TG | gCA/gTG | A/V | Unchanged |
| SIGLEC5 | 19-52133292-AC-GT | GTt/ACt | V/T | Changed missense |
| ZNF534 | 19-52942445-CA-TG | CAc/TGc | H/C | Changed missense |
| ERVV-2 | 19-53554074-CA-TG | CAa/TGa | Q/* | Unchanged |
| VN1R2 | 19-53761764-ACC-GCT | AcC/GcT | T/A | Unchanged |
| LILRA6 | 19-54745906-CA-TG | aTG/aCA | M/T | Partially changed missense |
| LILRA4 | 19-54844856-CA-TG | TGg/CAg | W/Q | Rescued nonsense |
| LILRB4 | 19-55179216-CA-TG | gCA/gTG | A/V | Unchanged |
| PTPRH | 19-55708555-CAA-TAG | TtG/CtA | L | Unchanged |
| PTPRH | 19-55713614-ATC-GTT | GaT/AaC | D/N | Unchanged |
| ZNF628 | 19-55994652-CA-TG | CAg/TGg | Q/W | Rescued nonsense |
| CCDC106 | 19-56162774-AGC-GGT | AgC/GgT | S/G | Unchanged |
| NLRP13 | 19-56407380-ATC-TTG | GaT/CaA | D/Q | Changed missense |
| ZNF71 | 19-57133632-AC-GT | tAC/tGT | Y/C | Unchanged |
| ZSCAN4 | 19-58189713-CTA-TTG | CtA/TtG | L | Unchanged |
| SNTG2 | 2-1271230-ATC-GTT | AtC/GtT | I/V | Unchanged |
| TAF1B | 2-10045013-AC-GT | tAC/tGT | Y/C | Unchanged |
| MSGN1 | 2-17998095-CA-TG | CAc/TGc | H/C | Changed missense |
| EMILIN1 | 2-27306045-CA-TG | CAa/TGa | Q/* | Unchanged |
| CAD | 2-27460967-CA-TG | gCA/gTG | A/V | Unchanged |
| WDR43 | 2-29152526-CCA-GCT | CcA/GcT | P/A | Unchanged |
| FAM179A | 2-29240059-CA-TG | CAg/TGg | Q/W | Rescued nonsense |
| LTBP1 | 2-33447201-AC-GT | aAC/aGT | N/S | Unchanged |
| RASGRP3 | 2-33764176-AC-GT | ACg/GTg | T/V | Changed missense |
| ATL2 | 2-38604349-CCA-TCG | TgG/CgA | W/R | Rescued nonsense |
| SOCS5 | 2-46986415-CA-TG | aCA/aTG | T/M | Changed missense |
| MSH6 | 2-48018080-CA-TG | cCA/cTG | P/L | Unchanged |
| EML6 | 2-55040425-CA-TG | cCA/cTG | P/L | Unchanged |
| USP34 | 2-61575307-CA-TG | aTG/aCA | M/T | Partially changed missense |
| FAM161A | 2-62066927-AC-GT | tGT/tAC | C/Y | Unchanged |
| CEP68 | 2-65298838-CA-TG | aCA/aTG | T/M | Changed missense |
| LOXL3 | 2-74761469-CA-GT | TGt/ACt | C/T | Changed missense |
| HK2 | 2-75113656-AC-GT | aAC/aGT | N/S | Unchanged |
| IGKV3-15 | 2-89384829-AGC-GGT | GcT/AcC | A/T | Unchanged |
| ITPRIPL1 | 2-96993883-CA-TG | cCA/cTG | P/L | Unchanged |
| FAHD2B | 2-97755996-CCA-TCG | TgG/CgA | W/R | Rescued nonsense |
| ANKRD36 | 2-97909726-CA-TG | gCA/gTG | A/V | Unchanged |
| RFX8 | 2-102018907-CA-TG | aTG/aCA | M/T | Partially changed missense |
| TGFBRAP1 | 2-105924510-AC-GT | cGT/cAC | R/H | Unchanged |
| RANBP2 | 2-109374951-CA-TG | tCA/tTG | S/L | Unchanged |
| MERTK | 2-112705142-CA-TG | cCA/cTG | P/L | Unchanged |
| MERTK | 2-112765972-CA-TG | tCA/tTG | S/L | Unchanged |
| TUBA3D | 2-132237982-CA-TG | aCA/aTG | T/M | Changed missense |
| TUBA3D | 2-132238284-ACC-GCT | AcC/GcT | T/A | Unchanged |
| NCKAP5 | 2-133541574-AC-GT | GTc/ACc | V/T | Changed missense |
| THSD7B | 2-138417312-CA-TG | aCA/aTG | T/M | Changed missense |
| RIF1 | 2-152322332-AAC-GAT | AaC/GaT | N/D | Unchanged |
| COBLL1 | 2-165551659-CA-GT | TGg/ACg | W/T | Changed missense |
| TTN | 2-179518002-CA-TG | tTG/tCA | L/S | Unchanged |
| ZNF804A | 2-185802362-CA-TG | CAc/TGc | H/C | Changed missense |
| FSIP2 | 2-186678632-AC-GT | ACt/GTt | T/V | Changed missense |
| SLC40A1 | 2-190430177-AAC-GAT | GtT/AtC | V/I | Unchanged |
| CRYGB | 2-209010694-CA-GT | TGc/ACc | C/T | Changed missense |
| C2orf80 | 2-209036777-CA-TG | TGc/CAc | C/H | Changed missense |
| CPS1 | 2-211456637-ACC-GCT | AcC/GcT | T/A | Unchanged |
| TNS1 | 2-218674696-AC-GT | GTc/ACc | V/T | Changed missense |
| TNS1 | 2-218683153-CA-TG | TGg/CAg | W/Q | Rescued nonsense |
| RUFY4 | 2-218940395-CA-TG | CAa/TGa | Q/* | Unchanged |
| DNPEP | 2-220250146-CA-TG | gTG/gCA | V/A | Unchanged |
| TMEM198 | 2-220414015-AC-GT | gAC/gGT | D/G | Unchanged |
| COL4A3 | 2-228131169-AC-GT | cAC/cGT | H/R | Unchanged |
| SP140L | 2-231256811-CA-TG | gCA/gTG | A/V | Unchanged |
| UGT1A4 | 2-234627743-AC-GT | ACg/GTg | T/V | Changed missense |
| RAB17 | 2-238494741-CA-TG | gTG/gCA | V/A | Unchanged |
| AC079612.1 | 2-240500412-CA-TG | cCA/cTG | P/L | Unchanged |
| PRR21 | 2-240981486-CA-TG | TGc/CAc | C/H | Changed missense |
| PRR21 | 2-240982130-CA-TG | aTG/aCA | M/T | Partially changed missense |
| PRR21 | 2-240982200-CA-TG | TGt/CAt | C/H | Changed missense |
| PRR21 | 2-240982256-CA-TG | aTG/aCA | M/T | Partially changed missense |
| GPC1 | 2-241405478-AC-GT | gAC/gGT | D/G | Unchanged |
| CAPN10 | 2-241531477-CCA-TCG | CcA/TcG | P/S | Unchanged |
| AC104809.3 | 2-241898823-CA-TG | CAg/TGg | Q/W | Rescued nonsense |
| SDCBP2 | 20-1293008-CA-TG | gTG/gCA | V/A | Unchanged |
| SMOX | 20-4164282-CA-TG | aCA/aTG | T/M | Changed missense |
| PABPC1L | 20-43566786-CA-TG | tCA/tTG | S/L | Unchanged |
| FAM65C | 20-49214155-CA-TG | cTG/cCA | L/P | Unchanged |
| OGFR | 20-61444628-CA-TG | cCA/cTG | P/L | Unchanged |
| SLC17A9 | 20-61594679-AC-GT | aAC/aGT | N/S | Unchanged |
| RRP1B | 21-45107517-CA-TG | cCA/cTG | P/L | Unchanged |
| KRTAP10-6 | 21-46012363-CA-TG | aTG/aCA | M/T | Unchanged |
| COL18A1 | 21-46927488-CA-TG | aCA/aTG | T/M | Changed missense |
| AC008132.13 | 22-18834965-CA-TG | gCA/gTG | A/V | Unchanged |
| TBX1 | 22-19753960-CA-TG | gCA/gTG | A/V | Unchanged |
| P2RX6 | 22-21377275-AC-GT | ACc/GTc | T/V | Changed missense |
| IGLV3-10 | 22-23154570-CCA-TCG | CcA/TcG | P/S | Unchanged |
| IGLV3-1 | 22-23223438-AGC-TGG | AgC/TgG | S/W | Changed missense |
| THOC5 | 22-29913271-AC-GT | GTt/ACt | V/T | Changed missense |
| CABP7 | 22-30123750-AC-GT | aAC/aGT | N/S | Unchanged |
| SLC35E4 | 22-31032918-CCA-TCG | CcA/TcG | P/S | Unchanged |
| C22orf42 | 22-32554984-CA-TG | cTG/cCA | L/P | Unchanged |
| CSF2RB | 22-37333793-CA-TG | cCA/cTG | P/L | Unchanged |
| TRIOBP | 22-38122461-CA-TG | CAc/TGc | H/C | Changed missense |
| SLC16A8 | 22-38474695-CA-TG | gTG/gCA | V/A | Unchanged |
| MCHR1 | 22-41075694-AC-GT | aAC/aGT | N/S | Unchanged |
| SCUBE1 | 22-43610106-CGA-TGG | TcG/CcA | S/P | Unchanged |
| PRR5-ARHGAP8 | 22-45198008-CA-TG | cCA/cTG | P/L | Unchanged |
| ARHGAP8 | 22-45198008-CA-TG | cCA/cTG | P/L | Unchanged |
| CELSR1 | 22-46929691-CA-TG | TGc/CAc | C/H | Changed missense |
| ZBED4 | 22-50277881-CCA-TCG | CcA/TcG | P/S | Unchanged |
| ZBED4 | 22-50277882-CA-TG | cCA/cTG | P/L | Unchanged |
| MOV10L1 | 22-50582625-CA-TG | CAg/TGg | Q/W | Rescued nonsense |
| TUBGCP6 | 22-50664611-CA-TG | tTG/tCA | L/S | Unchanged |
| TRNT1 | 3-3189278-CA-TG | gCA/gTG | A/V | Unchanged |
| IL17RE | 3-9952705-CA-TG | aCA/aTG | T/M | Changed missense |
| IL17RC | 3-9969880-AC-GT | ACg/GTg | T/V | Changed missense |
| TATDN2 | 3-10302055-CA-TG | CAt/TGt | H/C | Changed missense |
| RP11-438J1.1 | 3-10302055-CA-TG | CAt/TGt | H/C | Changed missense |
| CAND2 | 3-12856855-CA-TG | CAg/TGg | Q/W | Rescued nonsense |
| FBLN2 | 3-13670536-ACC-GCT | AcC/GcT | T/A | Unchanged |
| TMEM43 | 3-14180704-AGC-GGT | AgC/GgT | S/G | Unchanged |
| RP11-434D12.1 | 3-14180704-AGC-GGT | AgC/GgT | S/G | Unchanged |
| FGD5 | 3-14862947-CA-TG | cCA/cTG | P/L | Unchanged |
| DLEC1 | 3-38163574-CA-TG | cCA/cTG | P/L | Unchanged |
| SCN5A | 3-38592406-ATC-GTT | GaT/AaC | D/N | Unchanged |
| ZBTB47 | 3-42700629-CA-TG | cCA/cTG | P/L | Unchanged |
| FAM198A | 3-43095100-CA-TG | CAg/TGg | Q/W | Rescued nonsense |
| PTPN23 | 3-47453607-AC-TG | aAC/aTG | N/M | Changed missense |
| CCDC71 | 3-49200626-CA-TG | TGg/CAg | W/Q | Rescued nonsense |
| DNAH1 | 3-52430697-CA-TG | CAt/TGt | H/C | Changed missense |
| ITIH1 | 3-52821010-CA-TG | CAg/TGg | Q/W | Rescued nonsense |
| ITIH4 | 3-52864635-AC-GT | cGT/cAC | R/H | Unchanged |
| DCP1A | 3-53326340-AC-GT | GTg/ACg | V/T | Changed missense |
| PTPRG | 3-62189526-CA-TG | gCA/gTG | A/V | Unchanged |
| SLC25A26 | 3-66419941-CA-TG | gCA/gTG | A/V | Unchanged |
| FRMD4B | 3-69246150-CAA-TAG | TtG/CtA | L | Unchanged |
| CEP97 | 3-101476757-CA-TG | gCA/gTG | A/V | Unchanged |
| KIAA2018 | 3-113373929-CA-TG | gTG/gCA | V/A | Unchanged |
| HEG1 | 3-124728625-CA-TG | aTG/aCA | M/T | Partially changed missense |
| IGSF10 | 3-151166872-AC-GT | aGT/aAC | S/N | Unchanged |
| EPHB3 | 3-184289151-CA-TG | aCA/aTG | T/M | Changed missense |
| EHHADH | 3-184910041-CA-TG | tTG/tCA | L/S | Unchanged |
| LPP | 3-188590444-CGA-TGG | CgA/TgG | R/W | Rescued nonsense |
| PYDC2 | 3-191179192-CA-TG | CAa/TGa | Q/* | Unchanged |
| CPN2 | 3-194062517-AGC-GGT | GcT/AcC | A/T | Unchanged |
| MUC4 | 3-195506674-AC-GT | GTt/ACt | V/T | Changed missense |
| MUC4 | 3-195507226-AC-GT | GTc/ACc | V/T | Changed missense |
| MUC4 | 3-195507274-AC-GT | GTc/ACc | V/T | Changed missense |
| MUC4 | 3-195511138-AC-GT | GTt/ACt | V/T | Changed missense |
| MUC4 | 3-195514401-AGC-GGT | GcT/AcC | A/T | Unchanged |
| UVSSA | 4-1377614-CA-TG | tCA/tTG | S/L | Unchanged |
| EVC | 4-5735119-AC-GT | gAC/gGT | D/G | Unchanged |
| SH3TC1 | 4-8242465-CA-TG | gCA/gTG | A/V | Unchanged |
| CPZ | 4-8602934-CA-TG | tCA/tTG | S/L | Unchanged |
| SLC2A9 | 4-10020693-CA-TG | TGg/CAg | W/Q | Rescued nonsense |
| TMEM165 | 4-56262372-CCA-TCG | CcA/TcG | P/S | Unchanged |
| MTHFD2L | 4-75040281-CA-GT | CAg/GTg | Q/V | Changed missense |
| FRAS1 | 4-79240063-AC-GT | gAC/gGT | D/G | Unchanged |
| FRAS1 | 4-79372929-AC-GT | cAC/cGT | H/R | Unchanged |
| PTPN13 | 4-87684030-CA-TG | cCA/cTG | P/L | Unchanged |
| GRID2 | 4-94344031-AC-GT | tAC/tGT | Y/C | Unchanged |
| NEIL3 | 4-178256958-AC-TG | gAC/gTG | D/V | Partially changed missense |
| TENM3 | 4-183715018-AC-GT | gAC/gGT | D/G | Unchanged |
| SORBS2 | 4-186541301-AC-GT | cGT/cAC | R/H | Unchanged |
| DUX4L4 | 4-191003179-AC-GT | ACg/GTg | T/V | Changed missense |
| SLC9A3 | 5-475103-CA-TG | TGc/CAc | C/H | Changed missense |
| LPCAT1 | 5-1467003-CA-TG | aTG/aCA | M/T | Partially changed missense |
| SRD5A1 | 5-6651969-CA-TG | cCA/cTG | P/L | Unchanged |
| PDZD2 | 5-32058114-CA-TG | tCA/tTG | S/L | Unchanged |
| MROH2B | 5-41048532-AC-GT | cGT/cAC | R/H | Unchanged |
| ZNF131 | 5-43175101-AGC-GGT | AgC/GgT | S/G | Unchanged |
| ARHGEF28 | 5-73144844-CA-TG | tCA/tTG | S/L | Unchanged |
| PCDHA8 | 5-140222344-CGA-TGG | CgA/TgG | R/W | Rescued nonsense |
| PCDHA11 | 5-140250423-CTA-TTG | CtA/TtG | L | Unchanged |
| PCDHA12 | 5-140256624-CTA-TTG | CtA/TtG | L | Unchanged |
| PCDHB5 | 5-140516859-AGC-GGT | AgC/GgT | S/G | Unchanged |
| PCDHB10 | 5-140572667-AC-GT | aAC/aGT | N/S | Unchanged |
| PCDHB15 | 5-140627275-CA-TG | gCA/gTG | A/V | Unchanged |
| PCDHGB1 | 5-140731407-CA-TG | aCA/aTG | T/M | Changed missense |
| TCERG1 | 5-145838642-CA-TG | CAg/TGg | Q/W | Rescued nonsense |
| FAT2 | 5-150901612-CA-TG | tTG/tCA | L/S | Unchanged |
| HAVCR1 | 5-156479508-CA-TG | cTG/cCA | L/P | Unchanged |
| C5orf60 | 5-179069467-CA-TG | TGg/CAg | W/Q | Rescued nonsense |
| TBC1D9B | 5-179297352-AC-GT | tGT/tAC | C/Y | Unchanged |
| MGAT1 | 5-180218667-CA-TG | cTG/cCA | L/P | Unchanged |
| NQO2 | 6-3015789-CA-TG | cCA/cTG | P/L | Unchanged |
| PPP1R3G | 6-5086069-CA-TG | gCA/gTG | A/V | Unchanged |
| NUP153 | 6-17688691-ATC-GTT | GaT/AaC | D/N | Unchanged |
| LRRC16A | 6-25435757-CA-TG | tCA/tTG | S/L | Unchanged |
| HIST1H2BA | 6-25727263-ATC-GTT | AtC/GtT | I/V | Unchanged |
| HIST1H1A | 6-26017673-CAA-TAG | TtG/CtA | L | Unchanged |
| OR2J2 | 6-29142064-ACC-GCT | AcC/GcT | T/A | Unchanged |
| C6orf15 | 6-31079893-CA-TG | gTG/gCA | V/A | Unchanged |
| RNF5 | 6-32148029-CCA-TCG | CcA/TcG | P/S | Unchanged |
| HLA-DQA1 | 6-32610494-CA-TG | CAa/TGa | Q/* | Unchanged |
| HLA-DQB1 | 6-32632687-ATC-GTT | GaT/AaC | D/N | Unchanged |
| ZNF76 | 6-35260502-AC-GT | cAC/cGT | H/R | Unchanged |
| FRS3 | 6-41739191-AC-TG | gGT/gCA | G/A | Unchanged |
| C6orf132 | 6-42075068-CA-TG | tTG/tCA | L/S | Unchanged |
| GPR115 | 6-47682671-ATC-GTT | AtC/GtT | I/V | Unchanged |
| FILIP1 | 6-76023772-AC-GT | aGT/aAC | S/N | Unchanged |
| NT5E | 6-86199233-AC-GT | ACg/GTg | T/V | Changed missense |
| RP3-422G23.4 | 6-138703761-CA-TG | cCA/cTG | P/L | Unchanged |
| ADGB | 6-147136243-CA-TG | CAc/TGc | H/C | Changed missense |
| IGF2R | 6-160453977-CA-TG | tCA/tTG | S/L | Unchanged |
| LPA | 6-160969628-CA-TG | aTG/aCA | M/T | Partially changed missense |
| FAM120B | 6-170627835-AC-GT | ACa/GTa | T/V | Changed missense |
| AC145676.2 | 7-228658-CA-TG | TGt/CAt | C/H | Changed missense |
| FAM20C | 7-299881-AAC-GAT | AaC/GaT | N/D | Unchanged |
| SUN1 | 7-897491-CA-TG | aCA/aTG | T/M | Changed missense |
| GPR146 | 7-1097894-CA-TG | cCA/cTG | P/L | Unchanged |
| MICALL2 | 7-1484572-AC-GT | gGT/gAC | G/D | Unchanged |
| DNAH11 | 7-21630981-CA-TG | gCA/gTG | A/V | Unchanged |
| AEBP1 | 7-44148552-CA-TG | aCA/aTG | T/M | Changed missense |
| NACAD | 7-45124285-CA-TG | gTG/gCA | V/A | Unchanged |
| ABCA13 | 7-48285165-CAA-TAG | CaA/TaG | Q/* | Unchanged |
| ZNF479 | 7-57193783-CA-TG | cTG/cCA | L/P | Unchanged |
| TYW1 | 7-66648155-AAC-GAT | AaC/GaT | N/D | Unchanged |
| TRIM74 | 7-72436651-CA-TG | TGg/CAg | W/Q | Rescued nonsense |
| TRIM50 | 7-72738748-CA-TG | TGg/CAg | W/Q | Rescued nonsense |
| STX1A | 7-73122923-ATC-GTT | GaT/AaC | D/N | Unchanged |
| WBSCR28 | 7-73280018-ACC-GCT | AcC/GcT | T/A | Unchanged |
| ABCB1 | 7-87179601-ACC-GCT | GgT/AgC | G/S | Unchanged |
| BAIAP2L1 | 7-97933601-CA-TG | tTG/tCA | L/S | Unchanged |
| MUC12 | 7-100646746-CA-TG | aCA/aTG | T/M | Changed missense |
| MUC17 | 7-100677585-CA-TG | tCA/tTG | S/L | Unchanged |
| MUC17 | 7-100682274-CA-TG | cCA/cTG | P/L | Unchanged |
| MUC17 | 7-100684749-CA-TG | cCA/cTG | P/L | Unchanged |
| ST7-OT4 | 7-116596696-CA-TG | CAt/TGt | H/C | Changed missense |
| CCDC136 | 7-128455767-CAA-GAT | CaA/GaT | Q/D | Changed missense |
| PLXNA4 | 7-131815310-ATC-GTT | GaT/AaC | D/N | Unchanged |
| PLXNA4 | 7-131883385-AC-TG | GTg/CAg | V/Q | Changed missense |
| CREB3L2 | 7-137600689-AC-GT | GTt/ACt | V/T | Changed missense |
| ATP6V0A4 | 7-138455987-CA-TG | gTG/gCA | V/A | Unchanged |
| TRBV7-4 | 7-142176377-CA-TG | TGc/CAc | C/H | Changed missense |
| CLCN1 | 7-143042836-AC-GT | gAC/gGT | D/G | Unchanged |
| OR2F1 | 7-143657800-CA-TG | aCA/aTG | T/M | Changed missense |
| OR2A14 | 7-143826695-AGC-TGG | AgC/TgG | S/W | Changed missense |
| KRBA1 | 7-149421772-CA-TG | CAt/TGt | H/C | Changed missense |
| SLC4A2 | 7-150771792-AC-GT | ACt/GTt | T/V | Changed missense |
| DPP6 | 7-154667627-CA-TG | cCA/cTG | P/L | Unchanged |
| AC021218.2 | 7-155755825-CA-TG | tCA/tTG | S/L | Unchanged |
| ARHGEF10 | 8-1900910-AC-GT | cAC/cGT | H/R | Unchanged |
| TNKS | 8-9564436-CA-TG | aCA/aTG | T/M | Changed missense |
| MTMR7 | 8-17270787-AC-GT | cGT/cAC | R/H | Unchanged |
| MTUS1 | 8-17612874-CA-TG | TGt/CAt | C/H | Changed missense |
| R3HCC1 | 8-23148929-CA-TG | aCA/aTG | T/M | Changed missense |
| DOCK5 | 8-25267621-CA-TG | cCA/cTG | P/L | Unchanged |
| MAK16 | 8-33356073-CA-TG | CAg/TGg | Q/W | Rescued nonsense |
| PROSC | 8-37623819-ATC-GTT | AtC/GtT | I/V | Unchanged |
| RSPO2 | 8-108970366-CA-TG | cTG/cCA | L/P | Unchanged |
| HHLA1 | 8-133089974-CA-TG | tTG/tCA | L/S | Unchanged |
| SLC45A4 | 8-142222374-ACC-GCT | GgT/AgC | G/S | Unchanged |
| GLIS3 | 9-4118206-CGA-TGG | TcG/CcA | S/P | Unchanged |
| RECK | 9-36105263-CA-TG | cCA/cTG | P/L | Unchanged |
| GRHPR | 9-37429813-CA-TG | gCA/gTG | A/V | Unchanged |
| OSTF1 | 9-77752508-ATC-GTT | AtC/GtT | I/V | Unchanged |
| FGD3 | 9-95780464-CA-TG | aCA/aTG | T/M | Changed missense |
| RAD23B | 9-110084388-CA-GT | aCA/aGT | T/S | Changed missense |
| RGS3 | 9-116346286-AC-GT | tAC/tGT | Y/C | Unchanged |
| DFNB31 | 9-117166245-CA-TG | gTG/gCA | V/A | Unchanged |
| DFNB31 | 9-117169032-CA-TG | aTG/aCA | M/T | Partially changed missense |
| DFNB31 | 9-117186677-AC-GT | gGT/gAC | G/D | Unchanged |
| OR1B1 | 9-125391407-CAA-TAG | TtG/CtA | L | Unchanged |
| WDR38 | 9-127618775-CA-TG | CAc/TGc | H/C | Changed missense |
| LRSAM1 | 9-130242166-AAC-GAT | AaC/GaT | N/D | Unchanged |
| ODF2 | 9-131235320-CA-TG | aCA/aTG | T/M | Changed missense |
| ASS1 | 9-133346225-AC-GT | cAC/cGT | H/R | Unchanged |
| LAMC3 | 9-133911597-CA-TG | gCA/gTG | A/V | Unchanged |
| DBH | 9-136518096-CA-TG | aCA/aTG | T/M | Changed missense |
| AL390778.1 | 9-138150587-CA-TG | cTG/cCA | L/P | Unchanged |
| AL390778.1 | 9-138151156-CA-TG | tTG/tCA | L/S | Unchanged |
| PPP1R26 | 9-138378856-AAC-GAT | AaC/GaT | N/D | Unchanged |
| ENTPD8 | 9-140332477-CA-TG | cTG/cCA | L/P | Unchanged |
| PNPLA7 | 9-140357971-CA-TG | TGg/CAg | W/Q | Rescued nonsense |
| PNPLA7 | 9-140396120-CA-TG | gTG/gCA | V/A | Unchanged |
| EHMT1 | 9-140611120-CA-GT | gCA/gGT | A/G | Unchanged |
| GYG2 | X-2779569-CA-TG | CAc/TGc | H/C | Changed missense |
| SHROOM2 | X-9859097-CA-TG | cCA/cTG | P/L | Unchanged |
| MAGEB16 | X-35820794-CA-TG | CAc/TGc | H/C | Changed missense |
| RBMXL3 | X-114425236-AC-GT | tAC/tGT | Y/C | Unchanged |
| CCDC160 | X-133379551-CTA-TTG | CtA/TtG | L | Unchanged |
| MAGEA4 | X-151092219-CA-TG | gCA/gTG | A/V | Unchanged |
| CSAG1 | X-151908844-AC-TG | tAC/tTG | Y/L | Rescued nonsense |
| ATP6AP1 | X-153657081-CGA-TGG | CgA/TgG | R/W | Rescued nonsense |

TABLE G
Specific targetable MNV mutations from the gnomAD database that can
be modelled with SPACE using Cas9 proteins with NGA PAM recognition.

| Gene_name | MNV | MNV_codons | MNV_AAs | MNV_Category |
|---|---|---|---|---|
| C1orf170 | 1-915420-CA-TG | gTG/gCA | V/A | Unchanged |
| C1orf170 | 1-915421-AC-GT | GTg/ACg | V/T | Changed missense |
| C1orf170 | 1-916548-CA-TG | TGg/CAg | W/Q | Rescued nonsense |
| ATAD3B | 1-1423266-CA-TG | gCA/gTG | A/V | Unchanged |
| C1orf222 | 1-1875859-ATC-GTT | GaT/AaC | D/N | Unchanged |
| PRKCZ | 1-1991013-CA-TG | cCA/cTG | P/L | Unchanged |
| MORN1 | 1-2268235-CA-TG | TGt/CAt | C/H | Changed missense |
| CCDC27 | 1-3669200-CA-TG | cCA/cTG | P/L | Unchanged |
| KCNAB2 | 1-6158561-CA-TG | tCA/tTG | S/L | Unchanged |
| THAP3 | 1-6693096-CA-TG | CAg/TGg | Q/W | Rescued nonsense |
| PER3 | 1-7890063-CA-TG | aCA/aTG | T/M | Changed missense |
| SLC45A1 | 1-8390494-CA-TG | cCA/cTG | P/L | Unchanged |
| H6PD | 1-9324669-CA-TG | tCA/tTG | S/L | Unchanged |
| MASP2 | 1-11090896-CA-TG | gTG/gCA | V/A | Unchanged |
| PLOD1 | 1-12024233-AAC-GAT | AaC/GaT | N/D | Unchanged |
| PRAMEF1 | 1-12855598-AC-TG | aAC/aTG | N/M | Changed missense |
| PRAMEF2 | 1-12921087-AC-TG | aAC/aTG | N/M | Changed missense |
| PRAMEF4 | 1-12942989-CA-TG | TGt/CAt | C/H | Changed missense |
| CLCNKB | 1-16375063-CA-GT | gCA/gGT | A/G | Unchanged |
| NBPF1 | 1-16916483-AC-GT | tGT/tAC | C/Y | Unchanged |
| UBR4 | 1-19433449-AAC-GAT | GtT/AtC | V/I | Unchanged |
| TMCO4 | 1-20020993-AC-GT | cGT/cAC | R/H | Unchanged |
| EPHA8 | 1-22919903-AC-GT | aAC/aGT | N/S | Unchanged |
| STPG1 | 1-24710404-CA-TG | aTG/aCA | M/T | Partially changed missense |
| AC114494.1 | 1-31902417-CA-TG | aTG/aCA | M/T | Partially changed missense |
| ZSCAN20 | 1-33960061-CA-TG | gCA/gTG | A/V | Unchanged |
| AGO1 | 1-36359668-CA-TG | cCA/cTG | P/L | Unchanged |
| CSF3R | 1-36937065-AC-GT | cGT/cAC | R/H | Unchanged |
| GRIK3 | 1-37267555-AC-GT | GTc/ACc | V/T | Changed missense |
| GUCA2B | 1-42619138-CA-TG | gCA/gTG | A/V | Unchanged |
| TIE1 | 1-43784954-CTA-TTG | CtA/TtG | L | Unchanged |
| MAST2 | 1-46500882-AC-GT | aAC/aGT | N/S | Unchanged |
| SLC1A7 | 1-53558270-AC-GT | cGT/cAC | R/H | Unchanged |
| MROH7-TTC4 | 1-55139740-CA-TG | CAc/TGc | H/C | Changed missense |
| MROH7 | 1-55139740-CA-TG | CAc/TGc | H/C | Changed missense |
| KANK4 | 1-62728783-CA-TG | gTG/gCA | V/A | Unchanged |
| AK5 | 1-77759577-CA-TG | gCA/gTG | A/V | Unchanged |
| SSX2IP | 1-85113228-CA-TG | TGt/CAt | C/H | Changed missense |
| CLCA2 | 1-86920902-CAA-TAG | CaA/TaG | Q/* | Unchanged |
| ATP5F1 | 1-112002206-AC-GT | cAC/cGT | H/R | Unchanged |
| PTPN22 | 1-114377567-CA-TG | TGg/CAg | W/Q | Rescued nonsense |
| IGSF3 | 1-117142868-CA-TG | TGg/CAg | W/Q | Rescued nonsense |
| NBPF16 | 1-148756446-AC-GT | aAC/aGT | N/S | Unchanged |
| CGN | 1-151502977-CA-TG | CAg/TGg | Q/W | Rescued nonsense |
| THEM5 | 1-151825919-CA-TG | aTG/aCA | M/T | Partially changed missense |
| FLG | 1-152277363-CCA-TCG | TgG/CgA | W/R | Rescued nonsense |
| FLG | 1-152279715-CA-TG | gTG/gCA | V/A | Unchanged |
| FLG | 1-152279919-CA-TG | tTG/tCA | L/S | Unchanged |
| FLG | 1-152280687-CA-TG | gTG/gCA | V/A | Unchanged |
| FLG | 1-152283333-CA-TG | gTG/gCA | V/A | Unchanged |
| FLG | 1-152284170-CCA-TCG | TgG/CgA | W/R | Rescued nonsense |
| FLG | 1-152285553-CA-TG | gTG/gCA | V/A | Unchanged |
| FLG | 1-152286126-AC-GT | cGT/cAC | R/H | Unchanged |
| LCE1D | 1-152770506-AC-GT | cAC/cGT | H/R | Unchanged |
| ADAMTS4 | 1-161168004-CGA-TGG | TcG/CcA | S/P | Unchanged |
| FCGR2A | 1-161476204-CA-TG | CAg/TGg | Q/W | Rescued nonsense |
| ATF6 | 1-161928326-CA-TG | tCA/tTG | S/L | Unchanged |
| POGK | 1-166818565-CA-TG | gCA/gTG | A/V | Unchanged |
| FMO2 | 1-171168584-CA-TG | tCA/tTG | S/L | Unchanged |
| SUCO | 1-172558523-CA-TG | cCA/cTG | P/L | Unchanged |
| QSOX1 | 1-180145087-CA-TG | aCA/aTG | T/M | Changed missense |
| SMG7 | 1-183510142-AC-GT | cAC/cGT | H/R | Unchanged |
| SWT1 | 1-185171868-CA-TG | CAc/TGc | H/C | Changed missense |
| HMCN1 | 1-186101538-CA-TG | CAa/TGa | Q/* | Unchanged |
| IGFN1 | 1-201175273-CA-TG | CAg/TGg | Q/W | Rescued nonsense |
| ATP2B4 | 1-203652443-CA-TG | tCA/tTG | S/L | Unchanged |
| CR1 | 1-207753620-CA-TG | CAt/TGt | H/C | Changed missense |
| CAMK1G | 1-209782342-CA-TG | cCA/cTG | P/L | Unchanged |
| TRAF5 | 1-211533351-CA-TG | gCA/gTG | A/V | Unchanged |
| HHIPL2 | 1-222721288-CA-TG | tTG/tCA | L/S | Unchanged |
| EPHX1 | 1-226026405-CA-TG | CAt/TGt | H/C | Changed missense |
| OBSCN | 1-228402120-CA-TG | CAg/TGg | Q/W | Rescued nonsense |
| OBSCN | 1-228433216-CA-TG | aCA/aTG | T/M | Changed missense |
| OBSCN | 1-228465346-AAC-GAT | AaC/GaT | N/D | Unchanged |
| OBSCN | 1-228480281-CA-TG | aCA/aTG | T/M | Changed missense |
| OBSCN | 1-228503676-CA-TG | CAc/TGc | H/C | Changed missense |
| OBSCN | 1-228503677-AC-GT | cAC/cGT | H/R | Unchanged |
| OBSCN | 1-228560138-CA-TG | tCA/tTG | S/L | Unchanged |
| OR2L8 | 1-248112835-CA-TG | CAc/TGc | H/C | Changed missense |
| OR2M3 | 1-248366682-AC-GT | ACa/GTa | T/V | Changed missense |
| OR2T12 | 1-248458735-CA-TG | TGg/CAg | W/Q | Rescued nonsense |
| OR2T3 | 1-248637064-CA-TG | cCA/cTG | P/L | Unchanged |
| OR14I1 | 1-248845498-CA-TG | gTG/gCA | V/A | Unchanged |
| AKR1E2 | 10-487291O-AC-GT | gAC/gGT | D/G | Unchanged |
| AKR1C1 | 10-5010571-CA-TG | aCA/aTG | T/M | Changed missense |
| ITGA8 | 10-15573050-AC-GT | GTa/ACa | V/T | Changed missense |
| PTER | 10-16547056-CAA-TAG | CaA/TaG | Q/* | Unchanged |
| NEBL | 10-21106620-AC-GT | GTa/ACa | V/T | Changed missense |
| KIAA1217 | 10-24813326-CA-TG | aCA/aTG | T/M | Changed missense |
| ASAH2C | 10-48003991-AC-GT | tGT/tAC | C/Y | Unchanged |
| NUTM2E | 10-81608367-CA-TG | CAg/TGg | Q/W | Rescued nonsense |
| CEP55 | 10-95262981-AC-GT | ACa/GTa | T/V | Changed missense |
| PYROXD2 | 10-100148175-CA-TG | aTG/aCA | M/T | Partially changed missense |
| HPS1 | 10-100202987-AC-GT | GTc/ACc | V/T | Changed missense |
| CWF19L1 | 10-102016043-AC-GT | tGT/tAC | C/Y | Unchanged |
| NRAP | 10-115411613-CA-TG | gTG/gCA | V/A | Unchanged |
| NRAP | 10-115411614-AC-GT | GTg/ACg | V/T | Changed missense |
| WDR11 | 10-122649481-CA-TG | gCA/gTG | A/V | Unchanged |
| CTBP2 | 10-126715153-CA-TG | cTG/cCA | L/P | Unchanged |
| JAKMIP3 | 10-133961493-AC-GT | cAC/cGT | H/R | Unchanged |
| LRRC27 | 10-134161631-CCA-TCG | CcA/TcG | P/S | Unchanged |
| LRRC27 | 10-134161632-CA-TG | cCA/cTG | P/L | Unchanged |
| CYP2E1 | 10-135342049-AC-TG | cAC/cTG | H/L | Partially changed missense |
| SCGB1C1 | 11-193721-CA-TG | aCA/aTG | T/M | Changed missense |
| PSMD13 | 11-244166-AC-GT | aAC/aGT | N/S | Unchanged |
| ATHL1 | 11-290815-CA-TG | gCA/gTG | A/V | Unchanged |
| ANO9 | 11-428384-CA-TG | TGc/CAc | C/H | Changed missense |
| MUC5B | 11-1264361-CA-TG | aCA/aTG | T/M | Changed missense |
| OR51B2 | 11-5345169-CA-TG | TGt/CAt | C/H | Changed missense |
| OR51B5 | 11-5364692-AGC-GGT | GcT/AcC | A/T | Unchanged |
| OR52H1 | 11-5566029-CA-TG | TGc/CAc | C/H | Changed missense |
| OR52L1 | 11-6007271-CA-TG | TGg/CAg | W/Q | Rescued nonsense |
| OR52L1 | 11-6007679-CA-TG | TGc/CAc | C/H | Changed missense |
| DNHD1 | 11-6550003-CA-TG | CAg/TGg | Q/W | Rescued nonsense |
| ZNF214 | 11-7022159-CA-TG | TGt/CAt | C/H | Changed missense |
| OR10A6 | 11-7949349-CA-TG | cTG/cCA | L/P | Unchanged |
| TUB | 11-8122089-AGC-GGT | AgC/GgT | S/G | Unchanged |
| SWAP70 | 11-9754220-AC-GT | aAC/aGT | N/S | Unchanged |
| SAA4 | 11-18253176-CA-TG | TGc/CAc | C/H | Changed missense |
| SAA2 | 11-18267026-AC-GT | cGT/cAC | R/H | Unchanged |
| SLC6A5 | 11-20639399-CA-TG | tCA/tTG | S/L | Unchanged |
| SLC5A12 | 11-26702721-CA-TG | gTG/gCA | V/A | Unchanged |
| NAT10 | 11-34130341-CA-TG | tCA/tTG | S/L | Unchanged |
| OR4S1 | 11-48328642-AAC-GAT | AaC/GaT | N/D | Unchanged |
| OR4C16 | 11-55339829-AC-GT | ACc/GTc | T/V | Changed missense |
| OR4C16 | 11-55339829-ACC-GCT | AcC/GcT | T/A | Unchanged |
| OR5L1 | 11-55579340-CA-TG | aCA/aTG | T/M | Changed missense |
| OR5F1 | 11-55761220-AC-GT | aGT/aAC | S/N | Unchanged |
| OR5J2 | 11-55944778-CA-TG | CAc/TGc | H/C | Changed missense |
| OR8U1 | 11-56143976-CA-TG | CAg/TGg | Q/W | Rescued nonsense |
| FAM111A | 11-58919812-CA-TG | gCA/gTG | A/V | Unchanged |
| OR4D10 | 11-59245494-CTA-TTG | CtA/TtG | L | Unchanged |
| NUDT22 | 11-63997328-CA-TG | CAg/TGg | Q/W | Rescued nonsense |
| PLCB3 | 11-64022458-CA-TG | cCA/cTG | P/L | Unchanged |
| TMEM262 | 11-64856499-CA-TG | TGg/CAg | W/Q | Rescued nonsense |
| PCNXL3 | 11-65385605-CA-TG | CAg/TGg | Q/W | Rescued nonsense |
| TBC1D10C | 11-67176897-CA-TG | tCA/tTG | S/L | Unchanged |
| AIP | 11-67258390-CA-TG | CAg/TGg | Q/W | Rescued nonsense |
| ALDH3B1 | 11-67789137-AC-GT | tAC/tGT | Y/C | Unchanged |
| IGHMBP2 | 11-68703959-AC-GT | ACg/GTg | T/V | Changed missense |
| PPFIA1 | 11-70221159-CA-TG | gCA/gTG | A/V | Unchanged |
| DHCR7 | 11-71146691-ATC-GTT | GaT/AaC | D/N | Unchanged |
| FOLR1 | 11-71907094-CA-TG | cCA/cTG | P/L | Unchanged |
| PDE2A | 11-72293602-ATC-GTT | GaT/AaC | D/N | Unchanged |
| XRRA1 | 11-74554492-AC-GT | GTc/ACc | V/T | Changed missense |
| FAT3 | 11-92531355-CA-TG | CAg/TGg | Q/W | Rescued nonsense |
| KDM4E | 11-94759058-CA-TG | CAg/TGg | Q/W | Rescued nonsense |
| ARHGAP42 | 11-100846935-CA-TG | cCA/cTG | P/L | Unchanged |
| ARHGAP42 | 11-100847049-CA-TG | tCA/tTG | S/L | Unchanged |
| BUD13 | 11-116627892-CA-TG | TGg/CAg | W/Q | Rescued nonsense |
| BACE1 | 11-117160346-CA-TG | TGc/CAc | C/H | Changed missense |
| CEP164 | 11-117252437-AC-GT | cAC/cGT | H/R | Unchanged |
| CEP164 | 11-117267883-CA-TG | CAg/TGg | Q/W | Rescued nonsense |
| BCL9L | 11-118771746-CA-TG | gTG/gCA | V/A | Unchanged |
| VPS11 | 11-118947633-AC-GT | tAC/tGT | Y/C | Unchanged |
| TRIM29 | 11-119999189-CAA-TAG | TtG/CtA | L | Unchanged |
| POU2F3 | 11-120175748-CA-TG | CAc/TGc | H/C | Changed missense |
| OR6T1 | 11-123814489-AC-GT | aGT/aAC | S/N | Unchanged |
| OR8B4 | 11-124294235-CA-TG | TGt/CAt | C/H | Changed missense |
| WNK1 | 12-939301-CA-TG | gCA/gTG | A/V | Unchanged |
| KLRC3 | 12-10573093-CCA-TCG | TgG/CgA | W/R | Rescued nonsense |
| SMCO3 | 12-14959469-CA-TG | TGc/CAc | C/H | Changed missense |
| SMCO2 | 12-27648785-CA-TG | gCA/gTG | A/V | Unchanged |
| CCDC65 | 12-49308283-CA-TG | CAc/TGc | H/C | Changed missense |
| KRT7 | 12-52631312-CA-TG | CAc/TGc | H/C | Changed missense |
| C12orf10 | 12-53700847-AC-GT | ACt/GTt | T/V | Changed missense |
| C12orf10 | 12-53700859-CA-TG | CAc/TGc | H/C | Changed missense |
| OR10P1 | 12-56031610-CA-TG | tCA/tTG | S/L | Unchanged |
| SDR9C7 | 12-57324078-AC-GT | cGT/cAC | R/H | Unchanged |
| C12orf55 | 12-97073470-CA-TG | CAt/TGt | H/C | Changed missense |
| MYBPC1 | 12-102069076-CA-TG | cCA/cTG | P/L | Unchanged |
| MYO1H | 12-109853348-CA-TG | cCA/cTG | P/L | Unchanged |
| IFT81 | 12-110618233-CGA-TGG | CgA/TgG | R/W | Rescued nonsense |
| DNAH10 | 12-124387585-CA-TG | gCA/gTG | A/V | Unchanged |
| SCARB1 | 12-125284748-AGC-GGT | GcT/AcC | A/T | Unchanged |
| TMEM132C | 12-129181809-CA-TG | aCA/aTG | T/M | Changed missense |
| EP400 | 12-132549300-AC-GT | ACa/GTa | T/V | Changed missense |
| C1QTNF9B | 13-24468328-CA-TG | TGt/CAt | C/H | Changed missense |
| RNF17 | 13-25419175-CA-TG | aCA/aTG | T/M | Changed missense |
| SLC46A3 | 13-29287551-AC-GT | GTt/ACt | V/T | Changed missense |
| FRY | 13-32676113-CA-TG | aCA/aTG | T/M | Changed missense |
| POSTN | 13-38156519-AC-GT | GTc/ACc | V/T | Changed missense |
| PROSER1 | 13-39587676-CA-TG | gTG/gCA | V/A | Unchanged |
| MRPS31 | 13-41323395-ATC-GTT | GaT/AaC | D/N | Unchanged |
| TSC22D1 | 13-45148904-AC-GT | GTa/ACa | V/T | Changed missense |
| PHF11 | 13-50C80845-CTA-TTG | CtA/TtG | L | Unchanged |
| ARL11 | 13-50205139-CA-TG | CAt/TGt | H/C | Changed missense |
| TMTC4 | 13-101287339-AC-GT | GTt/ACt | V/T | Changed missense |
| CDC16 | 13-115016035-CA-TG | aCA/aTG | T/M | Changed missense |
| POTEM | 14-20019783-AGC-GGT | GcT/AcC | A/T | Unchanged |
| RPGRIP1 | 14-21770680-CA-TG | cCA/cTG | P/L | Unchanged |
| CHD8 | 14-21871653-CA-TG | gTG/gCA | V/A | Unchanged |
| TRAV36DV7 | 14-22695128-ATC-GTT | AtC/GtT | I/V | Unchanged |
| AKAP6 | 14-33293021-CA-TG | gCA/gTG | A/V | Unchanged |
| MIA2 | 14-39703323-CA-TG | gCA/gTG | A/V | Unchanged |
| NIN | 14-51211072-AC-GT | tGT/tAC | C/Y | Unchanged |
| SYNE2 | 14-64522842-CA-TG | CAc/TGc | H/C | Changed missense |
| PLEKHH1 | 14-68042573-CA-TG | CAc/TGc | H/C | Changed missense |
| SLC8A3 | 14-70634087-AC-GT | cGT/cAC | R/H | Unchanged |
| VRK1 | 14-97299852-CA-TG | gCA/gTG | A/V | Unchanged |
| WDR25 | 14-100847706-CA-TG | CAt/TGt | H/C | Changed missense |
| KIF26A | 14-104643408-CA-TG | gCA/gTG | A/V | Unchanged |
| AHNAK2 | 14-105408726-ATC-TTG | GaT/CaA | D/Q | Changed missense |
| AHNAK2 | 14-105408810-CA-TG | cTG/cCA | L/P | Unchanged |
| IGHV1-8 | 14-106539280-AC-GT | aGT/aAC | S/N | Unchanged |
| IGHV3-43 | 14-106926317-ACC-TCG | GgT/CgA | G/R | Unchanged |
| GOLGA6L2 | 15-23688942-CCA-TCG | TgG/CgA | W/R | Rescued nonsense |
| GOLGA6L2 | 15-23688943-CA-TG | TGg/CAg | W/Q | Rescued nonsense |
| CHRFAM7A | 15-30659682-AC-GT | GTg/ACg | V/T | Changed missense |
| TRPM1 | 15-31369122-CA-TG | aTG/aCA | M/T | Partially changed missense |
| FMN1 | 15-33357261-CA-TG | cTG/cCA | L/P | Unchanged |
| RYR3 | 15-34113535-CA-TG | gCA/gTG | A/V | Unchanged |
| FSIP1 | 15-39910430-CA-TG | TGt/CAt | C/H | Changed missense |
| EIF2AK4 | 15-40260064-CAA-GAT | CaA/GaT | Q/D | Changed missense |
| SPINT1 | 15-41137111-AC-GT | aAC/aGT | N/S | Unchanged |
| MGA | 15-42026763-AC-GT | gAC/gGT | D/G | Unchanged |
| STRC | 15-43900291-AC-TG | GTt/CAt | V/H | Changed missense |
| DUOX1 | 15-45444517-CA-TG | aCA/aTG | T/M | Changed missense |
| TPM1 | 15-63354415-AC-GT | tAC/tGT | Y/C | Unchanged |
| TRIP4 | 15-64706331-CA-TG | cCA/cTG | P/L | Unchanged |
| KIF23 | 15-69728947-CCA-TCG | CcA/TcG | P/S | Unchanged |
| KIF23 | 15-69728948-CA-TG | cCA/cTG | P/L | Unchanged |
| C15orf39 | 15-75498547-CA-TG | gCA/gTG | A/V | Unchanged |
| TMED3 | 15-79614417-CA-TG | gCA/gTG | A/V | Unchanged |
| IL16 | 15-81592801-CA-TG | aCA/aTG | T/M | Changed missense |
| AGBL1 | 15-87217612-CA-TG | CAa/TGa | Q/* | Unchanged |
| UNC45A | 15-91488184-AC-GT | ACc/GTc | T/V | Changed missense |
| LRRK1 | 15-101598312-ACC-GCT | AcC/GcT | T/A | Unchanged |
| CHTF18 | 16-842449-AC-GT | aAC/aGT | N/S | Unchanged |
| CACNA1H | 16-1261218-CA-TG | tCA/tTG | S/L | Unchanged |
| CACNA1H | 16-1261221-CA-TG | tCA/tTG | S/L | Unchanged |
| ZNF598 | 16-2049639-CA-TG | aTG/aCA | M/T | Partially changed missense |
| E4F1 | 16-2285355-ATC-GTT | AtC/GtT | I/V | Unchanged |
| OR2C1 | 16-3405993-CA-TG | tCA/tTG | S/L | Unchanged |
| VASN | 16-4431201-CA-TG | aCA/aTG | T/M | Changed missense |
| ABAT | 16-8839953-CA-TG | CAg/TGg | Q/W | Rescued nonsense |
| TNFRSF17 | 16-12060163-AC-GT | aAC/aGT | N/S | Unchanged |
| NPIPA7 | 16-16481609-CA-TG | aCA/aTG | T/M | Changed missense |
| EEF2K | 16-22269866-CA-TG | CAa/TGa | Q/* | Unchanged |
| APOBR | 16-28508446-CA-TG | gCA/gTG | A/V | Unchanged |
| QPRT | 16-29708350-AC-GT | ACt/GTt | T/V | Changed missense |
| TAOK2 | 16-29998199-CA-TG | aCA/aTG | T/M | Changed missense |
| ZNF423 | 16-49672520-AC-GT | cGT/cAC | R/H | Unchanged |
| CNGB1 | 16-57957215-CA-TG | gTG/gCA | V/A | Unchanged |
| TEPP | 16-58019140-AC-GT | tAC/tGT | Y/C | Unchanged |
| WWP2 | 16-69970328-CA-TG | aGA/aTG | T/M | Changed missense |
| HP | 16-72094490-CAA-GAT | CaA/GaT | Q/D | Changed missense |
| PKD1L2 | 16-81213377-CA-TG | cTG/cCA | L/P | Unchanged |
| ZNF469 | 16-88505634-CA-TG | cCA/cTG | P/L | Unchanged |
| CDK10 | 16-89753128-CCA-GCT | CcA/GcT | P/A | Unchanged |
| KIF1C | 17-4926881-CA-TG | cCA/cTG | P/L | Unchanged |
| WSCD1 | 17-6014175-CA-TG | aCA/aTG | T/M | Changed missense |
| ALOX12 | 17-6902759-CA-TG | CAg/TGg | Q/W | Rescued nonsense |
| AURKB | 17-8108330-CA-TG | aTG/aCA | M/T | Partially changed missense |
| DNAH9 | 17-11523081-CA-TG | CAa/TGa | Q/* | Unchanged |
| DNAH9 | 17-11648331-AC-GT | aAC/aGT | N/S | Unchanged |
| TBC1D26 | 17-15640814-CA-TG | CAc/TGc | H/C | Changed missense |
| TBC1D26 | 17-15640815-AC-GT | cAC/cGT | H/R | Unchanged |
| CCDC144A | 17-16593796-AGC-GGT | AgC/GgT | S/G | Unchanged |
| RP11-219A15.1 | 17-16593796-AGC-GGT | AgC/GgT | S/G | Unchanged |
| NF1 | 17-29556425-CA-TG | cCA/cTG | P/L | Unchanged |
| ARHGAP23 | 17-36646385-CA-TG | gCA/gTG | A/V | Unchanged |
| KRTAP4-16P | 17-39258040-AC-GT | GTc/ACc | V/T | Changed missense |
| KRT36 | 17-39646021-AC-GT | cGT/cAC | R/H | Unchanged |
| NBR1 | 17-41361959-CA-TG | CAt/TGt | H/C | Changed missense |
| SPPL2C | 17-43923897-CA-TG | tCA/tTG | S/L | Unchanged |
| LRRC37A | 17-44374709-CA-TG | cCA/cTG | P/L | Unchanged |
| TRIM37 | 17-57094674-CA-GT | TGt/ACt | C/T | Changed missense |
| SMG8 | 17-57287453-CA-TG | gCA/gTG | A/V | Unchanged |
| MED13 | 17-60059990-CA-GT | TGt/ACt | C/T | Changed missense |
| TLK2 | 17-60683502-CA-TG | cCA/cTG | P/L | Unchanged |
| ACE | 17-61564051-CA-TG | gCA/gTG | A/V | Unchanged |
| ABCA10 | 17-67178315-CA-TG | aTG/aCA | M/T | Partially changed missense |
| TTYH2 | 17-72248482-CA-TG | gCA/gTG | A/V | Unchanged |
| CD300A | 17-72469957-CA-TG | cCA/cTG | P/L | Unchanged |
| CD300LF | 17-72700943-AC-GT | GTc/ACc | V/T | Changed missense |
| QRICH2 | 17-74289704-CA-TG | tTG/1CA | L/S | Unchanged |
| ENCASE | 17-77078107-CGA-TGG | CgA/TgG | R/W | Rescued nonsense |
| RP11-1055B8.7 | 17-79414307-ACC-GCT | AcC/GcT | T/A | Unchanged |
| SMCHD1 | 18-2740713-CA-TG | aCA/aTG | T/M | Changed missense |
| TXNDC2 | 18-9887551-ATC-GTT | AtC/GtT | I/V | Unchanged |
| NPC1 | 18-21124945-CA-GT | aTG/aAC | M/N | Changed missense |
| CDH2 | 18-25565082-AC-GT | cGT/cAC | R/H | Unchanged |
| TRAPPC8 | 18-29497572-CA-TG | tTG/tCA | L/S | Unchanged |
| MOCOS | 18-33780019-CA-TG | CAc/TGc | H/C | Changed missense |
| SERPINB4 | 18-61305035-CA-TG | TGt/CAt | C/H | Changed missense |
| ADNP2 | 18-77893682-CA-TG | gCA/gTG | A/V | Unchanged |
| POLRMT | 19-621712-AGC-GGT | GcT/AcC | A/T | Unchanged |
| ARID3A | 19-929752-CA-TG | cCA/cTG | P/L | Unchanged |
| HMHA1 | 19-1085965-CA-TG | aCA/aTG | T/M | Changed missense |
| ZNF554 | 19-2834372-AC-GT | tAC/tGT | Y/C | Unchanged |
| ZNF557 | 19-7083628-CA-TG | tCA/tTG | S/L | Unchanged |
| CTD-3193O13.9 | 19-7934992-CA-TG | tTG/tCA | L/S | Unchanged |
| CTD-3193O13.9 | 19-7936006-CA-TG | aTG/aCA | M/T | Partially changed missense |
| MUC16 | 19-9017004-CA-TG | TGg/CAg | W/Q | Rescued nonsense |
| OR1M1 | 19-9204306-CA-TG | cCA/cTG | P/L | Unchanged |
| ZNF561 | 19-9721521-CA-TG | gTG/gCA | V/A | Unchanged |
| ZNF440 | 19-11942362-AC-GT | aAC/aGT | N/S | Unchanged |
| ZNF442 | 19-12461211-CA-TG | aTG/aCA | M/T | Partially changed missense |
| CYP4F11 | 19-16034713-CA-TG | TGc/CAc | C/H | Changed missense |
| ANKLE1 | 19-17395002-CA-TG | CAg/TGg | Q/W | Rescued nonsense |
| ANO8 | 19-17438642-AAC-GAT | GtT/AtC | V/I | Unchanged |
| ZNF85 | 19-21117760-AC-GT | ACt/GTt | T/V | Changed missense |
| ZNF99 | 19-22952110-CA-TG | TGg/CAg | W/Q | Rescued nonsense |
| FXYD5 | 19-35649280-CA-TG | cCA/cTG | P/L | Unchanged |
| ZNF567 | 19-37210804-AC-GT | tAC/tGT | Y/C | Unchanged |
| ZNF568 | 19-37441979-CA-TG | CAa/TGa | Q/* | Unchanged |
| ZNF527 | 19-37879588-CA-TG | CAt/TGt | H/C | Changed missense |
| SHKBP1 | 19-41096188-CA-TG | aCA/aTG | T/M | Changed missense |
| CYP2A13 | 19-41600231-CA-TG | aCA/aTG | T/M | Changed missense |
| PSG5 | 19-43679410-AGC-GGT | GcT/AcC | A/T | Unchanged |
| PSG5 | 19-43680299-CA-TG | cTG/cCA | L/P | Unchanged |
| TEX101 | 19-43922060-CA-TG | cCA/cTG | P/L | Unchanged |
| ZNF224 | 19-44610842-AC-GT | ACg/GTg | T/V | Changed missense |
| ZNF285 | 19-44891849-AC-GT | aGT/aAC | S/N | Unchanged |
| PVRL2 | 19-45389223-CA-TG | cCA/cTG | P/L | Unchanged |
| HIF3A | 19-46823701-CA-TG | CAg/TGg | Q/W | Rescued nonsense |
| PRKD2 | 19-47177913-AC-GT | GTg/ACg | V/T | Changed missense |
| FUT2 | 19-49206416-CA-TG | gCA/gTG | A/V | Unchanged |
| KCNA7 | 19-49575618-ACC-GCT | GgT/AgC | G/S | Unchanged |
| KLK3 | 19-51359502-CA-TG | gCA/gTG | A/V | Unchanged |
| SIGLEC5 | 19-52133292-AC-GT | GTt/ACt | V/T | Changed missense |
| ZNF701 | 19-53085565-AC-TG | ACt/TGt | T/C | Changed missense |
| LILRB2 | 19-54782406-AC-GT | cGT/cAC | R/H | Unchanged |
| LILRA4 | 19-54844856-CA-TG | TGg/CAg | W/Q | Rescued nonsense |
| LILRA1 | 19-55105726-CA-TG | aCA/aTG | T/M | Changed missense |
| LILRB1 | 19-55144184-AGC-GGT | AgC/GgT | S/G | Unchanged |
| LILRB4 | 19-55179216-CA-TG | gCA/gTG | A/V | Unchanged |
| SBK2 | 19-56047447-CA-TG | TGc/CAc | C/H | Changed missense |
| NLRP13 | 19-56407380-ATC-TTG | GaT/CaA | D/Q | Changed missense |
| ZNF460 | 19-57802805-AC-GT | aAC/aGT | N/S | Unchanged |
| ZNF749 | 19-57955243-CA-TG | CAg/TGg | Q/W | Rescued nonsense |
| SNTG2 | 2-1271230-ATC-GTT | AtC/GtT | I/V | Unchanged |
| CMPK2 | 2-7005369-AC-GT | tGT/tAC | C/Y | Unchanged |
| DDX1 | 2-15747392-AC-GT | aAC/aGT | N/S | Unchanged |
| FAM179A | 2-29226511-CA-TG | CAg/TGg | Q/W | Rescued nonsense |
| FAM179A | 2-29240059-CA-TG | CAg/TGg | Q/W | Rescued nonsense |
| TTC27 | 2-32855613-CTA-TTG | CtA/TtG | L | Unchanged |
| CYP1B1 | 2-38298150-ATC-GTT | GaT/AaC | D/N | Unchanged |
| CYP1B1 | 2-38298202-AC-TG | GTg/CAg | V/Q | Changed missense |
| ERLEC1 | 2-54035445-CAA-TAG | CaA/TaG | Q/* | Unchanged |
| EML6 | 2-55040425-CA-TG | cCA/cTG | P/L | Unchanged |
| FAM161A | 2-62066927-AC-GT | tGT/tAC | C/Y | Unchanged |
| CD207 | 2-71058834-CA-TG | gTG/gCA | V/A | Unchanged |
| HK2 | 2-75113656-AC-GT | aAC/aGT | N/S | Unchanged |
| VAMP8 | 2-85808735-CGA-TGG | CgA/TgG | R/W | Rescued nonsense |
| IGKV1-12 | 2-89339910-CCA-TCG | TgG/CgA | W/R | Rescued nonsense |
| IGKV2-24 | 2-89475830-CA-TG | aTG/aCA | M/T | Partially changed missense |
| ITPRIPL1 | 2-96993883-CA-TG | cCA/cTG | P/L | Unchanged |
| FAHD2B | 2-97755996-OCA-TCG | TgG/CgA | W/R | Rescued nonsense |
| ANKRD36 | 2-97909726-CA-TG | gCA/gTG | A/V | Unchanged |
| RFX8 | 2-102018907-CA-TG | aTG/aCA | M/T | Partially changed missense |
| MERTK | 2-112765972-CA-TG | tCA/tTG | S/L | Unchanged |
| GLI2 | 2-121747427-CCA-TCG | CcA/TcG | P/S | Unchanged |
| TUBA3E | 2-130949552-CA-TG | TGg/CAg | W/Q | Rescued nonsense |
| POTEI | 2-131220830-CA-TG | aTG/aCA | M/T | Partially changed missense |
| TUBA3D | 2-132237982-CA-TG | aCA/aTG | T/M | Changed missense |
| THSD7B | 2-138417312-CA-TG | aCA/aTG | T/M | Changed missense |
| RIF1 | 2-152322240-AC-TG | gAC/gTG | D/V | Partially changed missense |
| RIF1 | 2-152322332-AAC-GAT | AaC/GaT | N/D | Unchanged |
| NEB | 2-152483630-AGC-GGT | GcT/AcC | A/T | Unchanged |
| TANC1 | 2-160086691-CA-TG | aCA/aTG | T/M | Changed missense |
| SCN9A | 2-167099157-CA-TG | TGg/CAg | W/Q | Rescued nonsense |
| SLC40A1 | 2-190430177-AAC-GAT | GtT/AtC | V/I | Unchanged |
| MFSD6 | 2-191302004-AC-GT | ACa/GTa | T/V | Changed missense |
| CPO | 2-207833982-CA-TG | aCA/aTG | T/M | Changed missense |
| CRYGB | 2-209010694-CA-GT | TGc/ACc | C/T | Changed missense |
| C2orf80 | 2-209036777-CA-TG | TGc/CAc | C/H | Changed missense |
| CPS1 | 2-211456637-ACC-GCT | AcC/GcT | T/A | Unchanged |
| SPEG | 2-220355528-CA-TG | CAc/TGc | H/C | Changed missense |
| SP140L | 2-231256811-CA-TG | gCA/gTG | A/V | Unchanged |
| AC079612.1 | 2-240500412-CA-TG | cCA/cTG | P/L | Unchanged |
| OR6B2 | 2-240969311-CA-TG | TGt/CAt | C/H | Changed missense |
| PRR21 | 2-240981659-AC-GT | cGT/cAC | R/H | Unchanged |
| PRR21 | 2-240982200-CA-TG | TGt/CAt | C/H | Changed missense |
| PRR21 | 2-240982256-CA-TG | aTG/aCA | M/T | Partially changed missense |
| CAPN10 | 2-241531477-CCA-TCG | CcA/TcG | P/S | Unchanged |
| SIRPG | 20-1616205-CA-TG | gTG/gCA | V/A | Unchanged |
| SIRPG | 20-1616206-AC-GT | GTg/ACg | V/T | Changed missense |
| SIRPA | 20-1895819-AC-GT | ACt/GTt | T/V | Changed missense |
| PLCB4 | 20-9404443-AAC-GAT | AsC/GSsT | N/D | Unchanged |
| SPTLC3 | 20-13053034-CA-TG | tCA/tTG | S/L | Unchanged |
| CST5 | 20-23860177-CA-TG | TGt/CAt | C/H | Changed missense |
| CEP250 | 20-34057798-CA-TG | aCA/aTG | T/M | Changed missense |
| PABPC1L | 20-43566786-CA-TG | tCA/tTG | S/L | Unchanged |
| FAM65C | 20-49214155-CA-TG | cTG/cCA | L/P | Unchanged |
| PCK1 | 20-56137806-CA-TG | tCA/tTG | S/L | Unchanged |
| OGFR | 20-61444628-CA-TG | cCA/cTG | P/L | Unchanged |
| SYNJ1 | 21-34003930-AC-GT | GTt/ACt | V/T | Changed missense |
| MX1 | 21-42824660-CA-TG | gCA/gTG | A/V | Unchanged |
| TRPM2 | 21-45844750-CA-TG | CAa/TGa | Q/* | Unchanged |
| C21orf67 | 21-46355710-AC-GT | cGT/cAC | R/H | Unchanged |
| COL18A1 | 21-46927488-CA-TG | aCA/aTG | T/M | Changed missense |
| PCNT | 21-47841940-CA-TG | CAa/TGa | Q/* | Unchanged |
| PCNT | 21-47851752-CA-TG | CAg/TGg | Q/W | Rescued nonsense |
| PCNT | 21-47855875-CA-TG | aCA/aTG | T/M | Changed missense |
| POTEH | 22-16287337-AGC-GGT | GcT/AcC | A/T | Unchanged |
| BCL2L13 | 22-18209716-AAC-GAT | AaC/GaT | N/D | Unchanged |
| TSSK2 | 22-19119750-AC-GT | ACg/GTg | T/V | Changed missense |
| IGLV4-69 | 22-22385708-AC-TG | tAC/tTG | Y/L | Rescued nonsense |
| IGLV9-49 | 22-22698013-AAC-GAT | AaC/GaT | N/D | Unchanged |
| IGLV3-1 | 22-23223438-AGC-TGG | AgC/TgG | S/W | Changed missense |
| RGL4 | 22-24034287-CA-TG | CAg/TGg | Q/W | Rescued nonsense |
| PIWIL3 | 22-25145470-CA-TG | TGt/CAt | C/H | Changed missense |
| C22orf31 | 22-29456698-CA-TG | TGt/CAt | C/H | Changed missense |
| CSF2RB | 22-37333793-CA-TG | cCA/cTG | P/L | Unchanged |
| TRIOBP | 22-38122461-CA-TG | CAc/TGc | H/C | Changed missense |
| MCHR1 | 22-41075694-AC-GT | aAC/aGT | N/S | Unchanged |
| CYP2D6 | 22-42523942-CA-TG | TGc/CAc | C/H | Changed missense |
| PRR5-ARHGAP8 | 22-45198008-CA-TG | cCA/cTG | P/L | Unchanged |
| ARHGAP8 | 22-45198008-CA-TG | cCA/cTG | P/L | Unchanged |
| FBLN1 | 22-45923826-CA-TG | CAg/TGg | Q/W | Rescued nonsense |
| PKDREJ | 22-46652998-ATC-GTT | GaT/AaC | D/N | Unchanged |
| PKDREJ | 22-46656241-CA-TG | gTG/gCA | V/A | Unchanged |
| CELSR1 | 22-46929691-CA-TG | TGc/CAc | C/H | Changed missense |
| ZBED4 | 22-50277882-CA-TG | cCA/cTG | P/L | Unchanged |
| ZBED4 | 22-50278437-CA-TG | cCA/cTG | P/L | Unchanged |
| TUBGCP6 | 22-50664611-CA-TG | tTG/tCA | L/S | Unchanged |
| CHL1 | 3-391100-AC-GT | ACa/GTa | T/V | Changed missense |
| IL17RC | 3-9970030-CA-TG | CAa/TGa | Q/* | Unchanged |
| TATDN2 | 3-10302055-CA-TG | CAt/TGt | H/C | Changed missense |
| RP11-438J1.1 | 3-10302055-CA-TG | CAt/TGt | H/C | Changed missense |
| TATDN2 | 3-10312505-CTA-TTG | CtA/TtG | L | Unchanged |
| RP11-438J1.1 | 3-10312505-CTA-TTG | CtA/TtG | L | Unchanged |
| FBLN2 | 3-13670480-CA-TG | aCA/aTG | T/M | Changed missense |
| ZNF860 | 3-32031134-CA-TG | tCA/tTG | S/L | Unchanged |
| SCN5A | 3-38592406-ATC-GTT | GaT/AaQ | D/N | Unchanged |
| CX3CR1 | 3-39307254-AAC-GAT | GtT/AtC | V/I | Unchanged |
| FAM198A | 3-43074870-CA-TG | gCA/gTG | A/V | Unchanged |
| ZNF852 | 3-44540715-CA-TG | aTG/aCA | M/T | Partially changed missense |
| SACM1L | 3-45754684-CA-TG | cCA/cTG | P/L | Unchanged |
| PTPN23 | 3-47453607-AC-TG | aAC/aTG | N/M | Changed missense |
| PARP3 | 3-51978219-CA-TG | CAc/TGc | H/C | Changed missense |
| ALAS1 | 3-52237968-ATC-GTT | AtC/GtT | I/V | Unchanged |
| DCP1A | 3-53326340-AC-GT | GTg/ACg | V/T | Changed missense |
| CCDC66 | 3-56597952-ACC-GCT | AcC/GcT | T/A | Unchanged |
| PTPRG | 3-62189526-CA-TG | gCA/gTG | A/V | Unchanged |
| ZNF717 | 3-75787869-CA-TG | TGc/CAc | C/H | Changed missense |
| ZNF717 | 3-75790879-CA-TG | gTG/gCA | V/A | Unchanged |
| GUCA1C | 3-108639422-AC-GT | GTt/ACt | V/T | Changed missense |
| KIAA2018 | 3-113373929-CA-TG | gTG/gCA | V/A | Unchanged |
| AGTR1 | 3-148459883-CA-TG | cCA/cTG | P/L | Unchanged |
| KLHL24 | 3-183368890-AC-GT | cAC/cGT | H/R | Unchanged |
| LPP | 3-188590444-CGA-TGG | CgA/TgG | R/W | Rescued nonsense |
| PYDC2 | 3-191179192-CA-TG | CAa/TGa | Q/* | Unchanged |
| MUC4 | 3-195505944-CA-TG | gTG/gCA | V/A | Unchanged |
| MUC4 | 3-195506674-AC-GT | GTt/ACt | V/T | Changed missense |
| MUC4 | 3-195507144-CA-TG | gTG/gCA | V/A | Unchanged |
| MUC4 | 3-195507226-AC-GT | GTc/ACc | V/T | Changed missense |
| MUC4 | 3-195507274-AC-GT | GTc/ACc | V/T | Changed missense |
| MUC4 | 3-195509823-ACC-TCG | GgT/CgA | G/R | Unchanged |
| MUC4 | 3-195509832-CA-TG | gTG/gCA | V/A | Unchanged |
| MUC4 | 3-195509976-CA-TG | gTG/gCA | V/A | Unchanged |
| MUC4 | 3-195510024-CA-TG | gTG/gCA | V/A | Unchanged |
| MUC4 | 3-195511138-AC-GT | GTt/ACt | V/T | Changed missense |
| MUC4 | 3-195514401-AGC-GGT | GcT/AcC | A/T | Unchanged |
| MUC4 | 3-195514776-CA-TG | gTG/gCA | V/A | Unchanged |
| UVSSA | 4-1377614-CA-TG | tCA/tTG | S/L | Unchanged |
| RGS12 | 4-3318412-CA-TG | tCA/tTG | S/L | Unchanged |
| WFS1 | 4-6304086-CA-TG | tCA/tTG | S/L | Unchanged |
| SLC2A9 | 4-10020693-CA-TG | TGg/CAg | W/Q | Rescued nonsense |
| SCFD2 | 4-54011525-CA-TG | tTG/tCA | L/S | Unchanged |
| KIAA1211 | 4-57182757-AC-GT | gAC/gGT | D/G | Unchanged |
| LPHN3 | 4-62845489-CA-TG | cCA/cTG | P/L | Unchanged |
| UGT2B7 | 4-69972951-AC-GT | tAC/tGT | Y/C | Unchanged |
| AFP | 4-74318329-CA-TG | aCA/aTG | T/M | Changed missense |
| FRAS1 | 4-79240063-AC-GT | gAC/gGT | D/G | Unchanged |
| FRAS1 | 4-79372929-AC-GT | cAC/cGT | H/R | Unchanged |
| PTPN13 | 4-87671749-CA-TG | tCA/tTG | S/L | Unchanged |
| PTPN13 | 4-87684030-CA-TG | cCA/cTG | P/L | Unchanged |
| DSPP | 4-88535868-AC-GT | aAC/aGT | N/S | Unchanged |
| DSPP | 4-88536437-AAC-GAT | AaC/GaT | N/D | Unchanged |
| DSPP | 4-88536899-AAC-GAT | AaC/GaT | N/D | Unchanged |
| DSPP | 4-88537556-AAC-GAT | AaC/GaT | N/D | Unchanged |
| GRID2 | 4-94344031-AC-GT | tAC/tGT | Y/C | Unchanged |
| C4orf17 | 4-100443852-CA-TG | cCA/cTG | P/L | Unchanged |
| BANK1 | 4-102751276-CTA-TTG | CtA/TtG | L | Unchanged |
| SEC24B | 4-110384789-CA-TG | cCA/cTG | P/L | Unchanged |
| ANK2 | 4-114277480-CA-TG | gCA/gTG | A/V | Unchanged |
| UGT8 | 4-115544713-CA-TG | cCA/cTG | P/L | Unchanged |
| ADAM29 | 4-175899095-CA-TG | CAg/TGg | Q/W | Rescued nonsense |
| CDKN2AIP | 4-184367724-CA-TG | tCA/tTG | S/L | Unchanged |
| TRAPPC11 | 4-184600600-CA-TG | gCA/gTG | A/V | Unchanged |
| FAM149A | 4-187078784-CA-TG | CAc/TGc | H/C | Changed missense |
| SRD5A1 | 5-6651969-CA-TG | cCA/cTG | P/L | Unchanged |
| CDH12 | 5-21752056-ATC-GTT | GaT/AaC | D/N | Unchanged |
| PDZD2 | 5-32058114-CA-TG | tCA/tTG | S/L | Unchanged |
| AMACR | 5-33998882-CA-TG | tTG/tCA | L/S | Unchanged |
| ZNF131 | 5-43175101-AGC-GGT | AgC/GgT | S/G | Unchanged |
| RP11-45H22.3 | 5-54253580-CA-TG | TGt/CAt | C/H | Changed missense |
| MCCC2 | 5-70945074-CA-TG | gCA/gTG | A/V | Unchanged |
| ANKRD34B | 5-79855371-CA-TG | tTG/tCA | L/S | Unchanged |
| MSH3 | 5-80149980-CA-TG | CAg/TGg | Q/W | Rescued nonsense |
| ATG10 | 5-81549215-AC-GT | ACg/GTg | T/V | Changed missense |
| HSD17B4 | 5-118872183-AC-GT | ACa/GTa | T/V | Changed missense |
| IL13 | 5-131995963-CA-TG | CAg/TGg | Q/W | Rescued nonsense |
| APBB3 | 5-139941227-CA-TG | TGc/CAc | C/H | Changed missense |
| PCDHA8 | 5-140222344-CGA-TGG | CgA/TgG | R/W | Rescued nonsense |
| PCDHA12 | 5-140256624-CTA-TTG | CtA/TtG | L | Unchanged |
| PCDHB10 | 5-140572667-AC-GT | aAC/aGT | N/S | Unchanged |
| PCDHB15 | 5-140627275-CA-TG | gCA/gTG | A/V | Unchanged |
| TCOF1 | 5-149755420-CA-TG | tCA/tTG | S/L | Unchanged |
| GM2A | 5-150639409-ATC-GTT | AtC/GtT | I/V | Unchanged |
| FAT2 | 5-150901612-CA-TG | tTG/tCA | L/S | Unchanged |
| MRPL22 | 5-154346258-CA-TG | tCA/tTG | S/L | Unchanged |
| HAVCR1 | 5-156479508-CA-TG | cTG/cCA | L/P | Unchanged |
| WWC1 | 5-167894863-CA-TG | CAc/TGc | H/C | Changed missense |
| PRELID1 | 5-176733114-CGA-TGG | CgA/TgG | R/W | Rescued nonsense |
| MGAT1 | 5-180218667-CA-TG | cTG/cCA | L/P | Unchanged |
| BTNL8 | 5-180338368-AC-GT | ACg/GTg | T/V | Changed missense |
| NQO2 | 6-3015789-CA-TG | cCA/cTG | P/L | Unchanged |
| RREB1 | 6-7231769-CA-TG | cCA/cTG | P/L | Unchanged |
| LRRC16A | 6-25435757-CA-TG | tCA/tTG | S/L | Unchanged |
| MUC22 | 6-30993957-CA-TG | gCA/gTG | A/V | Unchanged |
| MUC22 | 6-31002452-AAC-GAT | AaC/GaT | N/D | Unchanged |
| C6orf15 | 6-31079893-CA-TG | gTG/gCA | V/A | Unchanged |
| CFB | 6-31914933-CGA-TGG | CgA/TgG | R/W | Rescued nonsense |
| CYP21A2 | 6-32006871-AC-GT | tAC/tGT | Y/C | Unchanged |
| RNF5 | 6-32148029-CCA-TCG | CcA/TcG | P/S | Unchanged |
| HLA-DRA | 6-32410986-CA-TG | aCA/aTG | T/M | Changed missense |
| ZNF76 | 6-35260502-AC-GT | cAC/cGT | H/R | Unchanged |
| KIF6 | 6-39325077-CA-TG | TGg/CAg | W/Q | Rescued nonsense |
| GPR111 | 6-47624298-CA-TG | CAt/TGt | H/C | Changed missense |
| C6orf57 | 6-71289188-CA-TG | CAg/TGg | Q/W | Rescued nonsense |
| DDX43 | 6-74125887-CA-TG | CAg/TGg | Q/W | Rescued nonsense |
| FILIP1 | 6-76023772-AC-GT | aGT/aAC | S/N | Unchanged |
| IRAK1BP1 | 6-79595096-CA-TG | gCA/gTG | A/V | Unchanged |
| NT5E | 6-86199233-AC-GT | ACg/GTg | T/V | Changed missense |
| TBC1D32 | 6-121625944-CA-TG | tTG/tCA | L/S | Unchanged |
| PTPRK | 6-128403745-AAC-GAT | GtT/AtC | V/I | Unchanged |
| ENPP3 | 6-131995312-CA-TG | cCA/cTG | P/L | Unchanged |
| VNN2 | 6-133072650-AC-GT | gGT/gAC | G/D | Unchanged |
| IL20RA | 6-137325846-AC-GT | GTa/ACa | V/T | Changed missense |
| GPR126 | 6-142758630-CA-TG | CAg/TGg | Q/W | Rescued nonsense |
| HIVEP2 | 6-143091262-CA-TG | cTG/cCA | L/P | Unchanged |
| IGF2R | 6-160453977-CA-TG | tCA/tTG | S/L | Unchanged |
| FAM120B | 6-170627803-AC-GT | gAC/gGT | D/G | Unchanged |
| FAM120B | 6-170627836-CA-TG | aCA/aTG | T/M | Changed missense |
| AC145676.2 | 7-228658-CA-TG | TGt/CAt | C/H | Changed missense |
| SUN1 | 7-897491-CA-TG | aCA/aTG | T/M | Changed missense |
| MICALL2 | 7-1484572-AC-GT | gGT/gAC | G/D | Unchanged |
| SDK1 | 7-4213974-CA-TG | CAt/TGt | H/C | Changed missense |
| MIOS | 7-7646686-CA-TG | aCA/aTG | T/M | Changed missense |
| DNAH11 | 7-21628196-CA-TG | CAg/TGg | Q/W | Rescued nonsense |
| DNAH11 | 7-21630981-CA-TG | gCA/gTG | A/V | Unchanged |
| FAM188B | 7-30915260-AAC-GAT | AaC/GaT | N/D | Unchanged |
| AQP1 | 7-30915260-AAC-GAT | AaC/GaT | N/D | Unchanged |
| FAM188B | 7-30915261-AC-GT | aAC/aGT | N/S | Unchanged |
| AQP1 | 7-30915261-AC-GT | aAC/aGT | N/S | Unchanged |
| CCDC129 | 7-31618007-CA-TG | CAt/TGt | H/C | Changed missense |
| AVL9 | 7-32613019-CA-TG | aCA/aTG | T/M | Changed missense |
| AEBP1 | 7-44148552-CA-TG | aCA/aTG | T/M | Changed missense |
| ABCA13 | 7-48285165-CAA-TAG | CaA/TaG | Q/* | Unchanged |
| TYW1 | 7-66660241-CA-TG | CAc/TGc | H/C | Changed missense |
| TYW1 | 7-66660242-AC-GT | cAC/cGT | H/R | Unchanged |
| RHBDD2 | 7-75513061-CA-TG | gCA/gTG | A/V | Unchanged |
| DTX2 | 7-76131645-AC-GT | ACa/GTa | T/V | Changed missense |
| DMTF1 | 7-86800350-CA-TG | gCA/gTG | A/V | Unchanged |
| ABCB1 | 7-87179601-ACC-GCT | GgT/AgC | G/S | Unchanged |
| FBXO24 | 7-100198385-AC-GT | ACg/GTg | T/V | Changed missense |
| MUC17 | 7-100677585-CA-TG | tCA/tTG | S/L | Unchanged |
| CUX1 | 7-101844850-CA-TG | cCA/cTG | P/L | Unchanged |
| NAPEPLD | 7-102743891-ATC-GTT | GaT/AaC | D/N | Unchanged |
| GPR85 | 7-112724525-ACC-GCT | GgT/AgC | G/S | Unchanged |
| PLXNA4 | 7-131883385-AC-TG | GTg/CAg | V/Q | Changed missense |
| CREB3L2 | 7-137600689-AC-GT | GTt/ACt | V/T | Changed missense |
| ATP6V0A4 | 7-138417790-CA-TG | aTG/aCA | M/T | Partially changed missense |
| TRBV6-9 | 7-142104527-CA-TG | gTG/gCA | V/A | Unchanged |
| TRBV7-4 | 7-142176377-CA-TG | TGc/CAc | C/H | Changed missense |
| CLCN1 | 7-143042836-AC-GT | gAC/gGT | D/G | Unchanged |
| EPHA1 | 7-143097099-CA-TG | gTG/gCA | V/A | Unchanged |
| ZNF775 | 7-150094851-AC-GT | ACg/GTg | T/V | Changed missense |
| DPP6 | 7-154667627-CA-TG | cCA/cTG | P/L | Unchanged |
| RNF32 | 7-156469189-CA-TG | gCA/gTG | A/V | Unchanged |
| WDR60 | 7-158672618-CA-TG | CAa/TGa | Q/* | Unchanged |
| NEIL2 | 8-11640783-CA-TG | cCA/cTG | P/L | Unchanged |
| DLC1 | 8-12957474-AC-GT | GTg/ACg | V/T | Changed missense |
| PCM1 | 8-17796382-AC-GT | aAC/aGT | N/S | Unchanged |
| PDLIM2 | 8-22442660-CA-TG | gCA/gTG | A/V | Unchanged |
| R3HCC1 | 8-23148929-CA-TG | aCA/aTG | T/M | Changed missense |
| DOCK5 | 8-25267621-CA-TG | cCA/cTG | P/L | Unchanged |
| ADRA1A | 8-26628027-CA-TG | TGc/CAc | C/H | Changed missense |
| DDHD2 | 8-38095661-AC-GT | ACg/GTg | T/V | Changed missense |
| PREX2 | 8-69143588-CA-TG | cCA/cTG | P/L | Unchanged |
| SBSPON | 8-73982160-CA-TG | TGg/CAg | W/Q | Rescued nonsense |
| ZFHX4 | 8-77765864-AC-GT | tAC/tGT | Y/C | Unchanged |
| PKHD1L1 | 8-110416812-AC-GT | tAC/tGT | Y/C | Unchanged |
| TBC1D31 | 8-124121797-CA-TG | gCA/gTG | A/V | Unchanged |
| HHLA1 | 8-133089974-CA-TG | tTG/tCA | L/S | Unchanged |
| ZFAT | 8-135614705-AC-GT | cGT/cAC | R/H | Unchanged |
| CYP11B2 | 8-143994265-CA-TG | gTG/gCA | V/A | Unchanged |
| FAM83H | 8-144808955-AC-TG | aGT/aCA | S/T | Partially changed missense |
| PLEC | 8-145011204-AGC-GGT | GcT/AcC | A/T | Unchanged |
| ADAMTSL1 | 9-18681820-CA-TG | aCA/aTG | T/M | Changed missense |
| TEK | 9-27202869-CA-TG | tCA/tTG | S/L | Unchanged |
| SPATA31A3 | 9-40702845-AC-GT | ACc/GTc | T/V | Changed missense |
| FGD3 | 9-95780464-CA-TG | aCA/aTG | T/M | Changed missense |
| TBC1D2 | 9-100972949-CA-TG | cTG/cCA | L/P | Unchanged |
| TBC1D2 | 9-100995720-CA-TG | tTG/tCA | L/S | Unchanged |
| INVS | 9-103015206-CTA-TTG | CtA/TtG | L | Unchanged |
| RAD23B | 9-110084388-CA-GT | aCA/aGT | T/S | Changed missense |
| RGS3 | 9-116346286-AC-GT | tAC/tGT | Y/C | Unchanged |
| DFNB31 | 9-117169032-CA-TG | aTG/aCA | M/T | Partially changed missense |
| WDR38 | 9-127618775-CA-TG | CAc/TGc | H/C | Changed missense |
| ODF2 | 9-131235320-CA-TG | aCA/aTG | T/M | Changed missense |
| PPP1R26 | 9-138378856-AAC-GAT | AsG/GsT | N/D | Unchanged |
| ENTPD8 | 9-140332477-CA-TG | cTG/cCA | L/P | Unchanged |
| PNPLA7 | 9-140357971-CA-TG | TGg/CAg | W/Q | Rescued nonsense |
| PNPLA7 | 9-140396120-CA-TG | gTG/gCA | V/A | Unchanged |
| PRKX | X-3631166-CA-TG | gTG/gCA | V/A | Unchanged |
| XAGE5 | X-52842212-CA-TG | CAg/TGg | Q/W | Rescued nonsense |
| TSPYL2 | X-53115057-AAC-GAT | AaC/GaT | N/D | Unchanged |
| MAGED2 | X-54836360-CA-TG | tCA/tTG | S/L | Unchanged |
| KIF4A | X-69516919-AC-TG | ACt/TGt | T/C | Changed missense |
| CCDC160 | X-133379551-CTA-TTG | CtA/TtG | L | Unchanged |
| SPANXN3 | X-142596981-AC-GT | GTa/ACa | V/T | Changed missense |
| MAGEA4 | X-151092219-CA-TG | gCA/gTG | A/V | Unchanged |
| CSAG1 | X-151908844-AC-TG | tAC/tTG | Y/L | Rescued nonsense |
| PLXNA3 | X-153694819-CA-TG | aCA/aTG | T/M | Changed missense |

TABLE H
Specific targetable MNV mutations from the gnomAD database that can
be modelled with SPACE using Cas9 proteins with NG PAM recognition.

| Gene_name | MNV | MNV_codons | MNV_AAs | MNV_category |
|---|---|---|---|---|
| C1orf170 | 1-911594-CA-TG | gTG/gCA | V/A | Unchanged |
| C1orf170 | 1-915225-CAA-TAG | TtG/CtA | L | Unchanged |
| C1orf170 | 1-915420-CA-TG | gTG/gCA | V/A | Unchanged |
| C1orf170 | 1-915421-AC-GT | GTg/ACg | V/T | Changed missense |
| C1orf170 | 1-916548-CA-TG | TGg/CAg | W/Q | Rescued nonsense |
| AGRN | 1-981930-CA-TG | tCA/tTG | S/L | Unchanged |
| ATAD3B | 1-1423266-CA-TG | gCA/gTG | A/V | Unchanged |
| C1orf222 | 1-1875859-ATC-GTT | GaT/AaC | D/N | Unchanged |
| PRKCZ | 1-1991013-CA-TG | cCA/cTG | P/L | Unchanged |
| MORN1 | 1-2268235-CA-TG | TGt/CAt | C/H | Changed missense |
| MMEL1 | 1-2526745-CA-TG | aTG/aCA | M/T | Partially changed missense |
| ARHGEF16 | 1-3383896-CCA-TCG | CcA/TcG | P/S | Unchanged |
| ARHGEF16 | 1-3383897-CA-TG | cCA/cTG | P/L | Unchanged |
| CCDC27 | 1-3669200-CA-TG | cCA/cTG | P/L | Unchanged |
| KCNAB2 | 1-6158561-CA-TG | tCA/tTG | S/L | Unchanged |
| CHD5 | 1-6184090-CGA-TGG | TcG/CcA | S/P | Unchanged |
| THAP3 | 1-6693096-CA-TG | CAg/TGg | Q/W | Rescued nonsense |
| PER3 | 1-7890063-CA-TG | aCA/aTG | T/M | Changed missense |
| SLC45A1 | 1-8390494-CA-TG | cCA/cTG | P/L | Unchanged |
| H6PD | 1-9324669-CA-TG | tCA/tTG | S/L | Unchanged |
| PEX14 | 1-10689923-AC-GT | gAC/gGT | D/G | Unchanged |
| MASP2 | 1-11090896-CA-TG | gTG/gCA | V/A | Unchanged |
| PLOD1 | 1-12024233-AAC-GAT | AaC/GaT | N/D | Unchanged |
| PRAMEF1 | 1-12855598-AC-TG | aAC/aTG | N/M | Changed missense |
| PRAMEF2 | 1-12921087-AC-TG | aAC/aTG | N/M | Changed missense |
| PRAMEF2 | 1-12921384-AC-GT | gAC/gGT | D/G | Unchanged |
| PRAMEF4 | 1-12939414-CA-TG | TGt/CAt | C/H | Changed missense |
| PRAMEF4 | 1-12942989-CA-TG | TGt/CAt | C/H | Changed missense |
| PRAMEF5 | 1-13365986-CA-TG | CAg/TGg | Q/W | Rescued nonsense |
| PRDM2 | 1-14143002-CA-TG | cCA/cTG | P/L | Unchanged |
| CLCNKB | 1-16375063-CA-GT | gCA/gGT | A/G | Unchanged |
| CLCNKB | 1-16378276-ATC-GTT | AtC/GtT | I/V | Unchanged |
| NBPF1 | 1-16916483-AC-GT | tGT/tAC | C/Y | Unchanged |
| ARHGEF10L | 1-18023364-AC-GT | aAC/aGT | N/S | Unchanged |
| PAX7 | 1-19027238-CA-TG | cCA/cTG | P/L | Unchanged |
| UBR4 | 1-19433449-AAC-GAT | GtT/AtC | V/I | Unchanged |
| EMC1 | 1-19566381-CA-TG | tTG/tCA | L/S | Unchanged |
| AKR7A3 | 1-19612476-AC-GT | GTg/ACg | V/T | Changed missense |
| TMCO4 | 1-20020993-AC-GT | cGT/cAC | R/H | Unchanged |
| EPHA8 | 1-22919903-AC-GT | aAC/aGT | N/S | Unchanged |
| STPG1 | 1-24710404-CA-TG | aTG/aCA | M/T | Partially changed missense |
| LDLRAP1 | 1-25890188-CA-TG | aCA/aTG | T/M | Changed missense |
| AC114494.1 | 1-31902417-CA-TG | aTG/aCA | M/T | Partially changed missense |
| HCRTR1 | 1-32092525-ATC-GTT | AtC/GtT | I/V | Unchanged |
| ZSCAN20 | 1-33960061-CA-TG | gCA/gTG | A/V | Unchanged |
| AGO1 | 1-36359668-CA-TG | cCA/cTG | P/L | Unchanged |
| TEKT2 | 1-36553672-CA-TG | aCA/aTG | T/M | Changed missense |
| CSF3R | 1-36937065-AC-GT | cGT/cAC | R/H | Unchanged |
| GRIK3 | 1-37267555-AC-GT | GTc/ACc | V/T | Changed missense |
| DNALI1 | 1-38023316-CA-TG | gCA/gTG | A/V | Unchanged |
| INPP5B | 1-38338794-CA-TG | aTG/aCA | M/T | Partially changed missense |
| NFYC | 1-41204567-AGC-GGT | AgC/GgT | S/G | Unchanged |
| HIVEP3 | 1-42046527-CA-GT | aTG/aAC | M/N | Changed missense |
| GUCA2B | 1-42619138-CA-TG | gCA/gTG | A/V | Unchanged |
| FOXJ3 | 1-42693596-CA-TG | gTG/gCA | V/A | Unchanged |
| TIE1 | 1-43784954-CTA-TTG | CtA/TtG | L | Unchanged |
| AKR1A1 | 1-46027527-AC-GT | ACc/GTc | T/V | Changed missense |
| MAST2 | 1-46500882-AC-GT | aAC/aGT | N/S | Unchanged |
| SLC1A7 | 1-53558270-AC-GT | cGT/cAC | R/H | Unchanged |
| MROH7 | 1-55119143-CA-TG | CAt/TGt | H/C | Changed missense |
| MROH7-TTC4 | 1-55119143-CA-TG | CAt/TGt | H/C | Changed missense |
| MROH7-TTC4 | 1-55139740-CA-TG | CAc/TGc | H/C | Changed missense |
| MROH7 | 1-55139740-CA-TG | CAc/TGc | H/C | Changed missense |
| KANK4 | 1-62728783-CA-TG | gTG/gCA | V/A | Unchanged |
| KANK4 | 1-62728784-AC-GT | GTg/ACg | V/T | Changed missense |
| LEPR | 1-66058512-CA-TG | CAg/TGg | Q/W | Rescued nonsense |
| AK5 | 1-77759577-CA-TG | gCA/gTG | A/V | Unchanged |
| IFI44L | 1-79093817-CA-TG | CAt/TGt | H/C | Changed missense |
| SSX2IP | 1-85113228-CA-TG | TGt/CAt | C/H | Changed missense |
| CLCA2 | 1-86920902-CAA-TAG | CaA/TaG | Q/* | Unchanged |
| CDC7 | 1-91980446-CA-TG | aCA/aTG | T/M | Changed missense |
| ARHGAP29 | 1-94639446-AC-GT | gGT/gAC | G/D | Unchanged |
| AMY2A | 1-104162194-AC-GT | ACt/GTt | T/V | Changed missense |
| KIAA1324 | 1-109737062-AC-GT | aAC/aGT | N/S | Unchanged |
| OVGP1 | 1-111957692-CA-TG | aTG/aCA | M/T | Partially changed missense |
| ATP5F1 | 1-112002206-AC-GT | cAC/cGT | H/R | Unchanged |
| PPM1J | 1-113255388-AC-GT | GTt/ACt | V/T | Changed missense |
| PTPN22 | 1-114377567-CA-TG | TGg/CAg | W/Q | Rescued nonsense |
| IGSF3 | 1-117142868-CA-TG | TGg/CAg | W/Q | Rescued nonsense |
| NBPF16 | 1-148756446-AC-GT | aAC/aGT | N/S | Unchanged |
| CGN | 1-151502977-CA-TG | CAg/TGg | Q/W | Rescued nonsense |
| SNX27 | 1-151634729-AC-GT | ACa/GTa | T/V | Changed missense |
| THEM5 | 1-151825919-CA-TG | aTG/aCA | M/T | Partially changed missense |
| HRNR | 1-152190349-CA-TG | tTG/tCA | L/S | Unchanged |
| FLG | 1-152277363-CCA-TCG | TgG/CgA | W/R | Rescued nonsense |
| FLG | 1-152277382-AC-TG | GTc/CAc | V/H | Changed missense |
| FLG | 1-152277402-AC-GT | cGT/cAC | R/H | Unchanged |
| FLG | 1-152279715-CA-TG | gTG/gCA | V/A | Unchanged |
| FLG | 1-152279919-CA-TG | tTG/tCA | L/S | Unchanged |
| FLG | 1-152280687-CA-TG | gTG/gCA | V/A | Unchanged |
| FLG | 1-152283333-CA-TG | gTG/gCA | V/A | Unchanged |
| FLG | 1-152284170-CCA-TCG | TgG/CgA | W/R | Rescued nonsense |
| FLG | 1-152284854-ATC-GTT | GaT/AaC | D/N | Unchanged |
| FLG | 1-152285553-CA-TG | gTG/gCA | V/A | Unchanged |
| FLG | 1-152286126-AC-GT | cGT/cAC | R/H | Unchanged |
| FLG | 1-152286342-ATC-TTG | GaT/CaA | D/Q | Changed missense |
| FLG | 1-152286385-CA-TG | TGg/CAg | W/Q | Rescued nonsense |
| LCE2A | 1-152671387-CA-TG | CAg/TGg | Q/W | Rescued nonsense |
| LCE1E | 1-152760074-CA-TG | tCA/tTG | S/L | Unchanged |
| LCE1D | 1-152770506-AC-GT | cAC/cGT | H/R | Unchanged |
| IVL | 1-152882860-CA-TG | cCA/cTG | P/L | Unchanged |
| LOR | 1-153233510-AGC-GGT | AgC/GgT | S/G | Unchanged |
| ATP8B2 | 1-154320941-CA-TG | aCA/aTG | T/M | Changed missense |
| ZBTB7B | 1-154988956-CA-TG | cCA/cTG | P/L | Unchanged |
| HCN3 | 1-155247394-CA-GT | CAg/GTg | Q/V | Changed missense |
| GON4L | 1-155735584-AC-TG | GTg/CAg | V/Q | Changed missense |
| GON4L | 1-155736381-CA-TG | tTG/tCA | L/S | Unchanged |
| APOA1BP | 1-156563850-ACC-GCT | AcC/GcT | T/A | Unchanged |
| FCRL5 | 1-157509024-AC-GT | gGT/gAC | G/D | Unchanged |
| CD1E | 1-158324424-CA-TG | CAg/TGg | Q/W | Rescued nonsense |
| OR6P1 | 1-158533224-AC-GT | cGT/cAC | R/H | Unchanged |
| MNDA | 1-158813818-CA-TG | cCA/cTG | P/L | Unchanged |
| ATP1A4 | 1-160141195-AC-GT | tAC/tGT | Y/C | Unchanged |
| COPA | 1-160281738-CA-GT | aTG/aAC | M/N | Changed missense |
| ADAMTS4 | 1-161168004-CGA-TGG | TcG/CcA | S/P | Unchanged |
| FCGR2A | 1-161476204-CA-TG | CAg/TGg | Q/W | Rescued nonsense |
| ATF6 | 1-161928326-CA-TG | tCA/tTG | S/L | Unchanged |
| POGK | 1-166818565-CA-TG | gCA/gTG | A/V | Unchanged |
| ADCY10 | 1-167849414-ACC-GCT | GgT/AgC | G/S | Unchanged |
| XCL1 | 1-168550337-CA-TG | aCA/aTG | T/M | Changed missense |
| FMO2 | 1-171168584-CA-TG | tCA/tTG | S/L | Unchanged |
| SUCO | 1-172558523-CA-TG | cCA/cTG | P/L | Unchanged |
| ZBTB37 | 1-173855207-CA-TG | aCA/aTG | T/M | Changed missense |
| TNR | 1-175324651-ATC-GTT | GaT/AaC | D/N | Unchanged |
| QSOX1 | 1-180145087-CA-TG | aCA/aTG | T/M | Changed missense |
| KIAA1614 | 1-180913597-AAC-GAT | AaC/GaT | N/D | Unchanged |
| IER5 | 1-181058642-CA-TG | CAa/TGa | Q/* | Unchanged |
| RGSL1 | 1-182499956-CA-TG | CAc/TGc | H/C | Changed missense |
| SMG7 | 1-183510142-AC-GT | cAC/cGT | H/R | Unchanged |
| FAM129A | 1-184765071-CA-TG | cTG/cCA | L/P | Unchanged |
| SWT1 | 1-185171868-CA-TG | CAc/TGc | H/C | Changed missense |
| HMCN1 | 1-186101538-CA-TG | CAa/TGa | Q/* | Unchanged |
| CFHR1 | 1-196797356-CA-TG | aCA/aTG | T/M | Changed missense |
| IGFN1 | 1-201175273-CA-TG | CAg/TGg | Q/W | Rescued nonsense |
| ATP2B4 | 1-203652443-CA-TG | tCA/tTG | S/L | Unchanged |
| DSTYK | 1-205130412-CA-TG | TGt/CAt | C/H | Changed missense |
| CR1 | 1-207753620-CA-TG | CAt/TGt | H/C | Changed missense |
| CR1L | 1-207850878-AC-GT | aAC/aGT | N/S | Unchanged |
| CAMK1G | 1-209782342-CA-TG | cCA/cTG | P/L | Unchanged |
| TRAF5 | 1-211533351-CA-TG | gCA/gTG | A/V | Unchanged |
| FAM71A | 1-212799870-AAC-GAT | AaC/GaT | N/D | Unchanged |
| 43891 | 1-220970028-ACC-GCT | AcC/GcT | T/A | Unchanged |
| HHIPL2 | 1-222721288-CA-TG | tTG/tCA | L/S | Unchanged |
| EPHX1 | 1-226026405-CA-TG | CAt/TGt | H/C | Changed missense |
| PARP1 | 1-226555301-CA-TG | gTG/gCA | V/A | Unchanged |
| OBSCN | 1-228402120-CA-TG | CAg/TGg | Q/W | Rescued nonsense |
| OBSCN | 1-228431094-CA-TG | aCA/aTG | T/M | Changed missense |
| OBSCN | 1-228433216-CA-TG | aCA/aTG | T/M | Changed missense |
| OBSCN | 1-228461128-CA-TG | CAc/TGc | H/C | Changed missense |
| OBSCN | 1-228465346-AAC-GAT | AaC/GaT | N/D | Unchanged |
| OBSCN | 1-228480281-CA-TG | aCA/aTG | T/M | Changed missense |
| OBSCN | 1-228503676-CA-TG | CAc/TGc | H/C | Changed missense |
| OBSCN | 1-228503677-AC-GT | cAC/cGT | H/R | Unchanged |
| OBSCN | 1-228560138-CA-TG | tCA/tTG | S/L | Unchanged |
| AGT | 1-230845793-CA-TG | aTG/aCA | M/T | Partially changed missense |
| CAPN9 | 1-230898493-AC-GT | aAC/aGT | N/S | Unchanged |
| SPRTN | 1-231487306-CA-TG | gCA/gTG | A/V | Unchanged |
| NID1 | 1-236208772-AC-GT | GTt/ACt | V/T | Changed missense |
| HEATR1 | 1 -236716959-CGA-TGG | TcG/CcA | S/P | Unchanged |
| HEATR1 | 1-236719192-CA-TG | gTG/gCA | V/A | Unchanged |
| MTR | 1-237Q54568-CA-TG | gCA/gTG | A/V | Unchanged |
| KIF26B | 1-245851303-CA-TG | aCA/aTG | T/M | Changed missense |
| OR2T8 | 1-248084470-CA-TG | CAc/TGc | H/C | Changed missense |
| OR2L8 | 1-248112835-CA-TG | CAc/TGc | H/C | Changed missense |
| OR2L3 | 1-248224587-ACC-GCT | AcC/GcT | T/A | Unchanged |
| OR2M3 | 1-248366682-AC-GT | ACa/GTa | T/V | Changed missense |
| OR2T33 | 1-248436616-AC-GT | tGT/tAC | C/Y | Unchanged |
| OR2T12 | 1-248458735-CA-TG | TGg/CAg | W/Q | Rescued nonsense |
| OR2T3 | 1-248637064-CA-TG | cCA/cTG | P/L | Unchanged |
| OR2T34 | 1-248737453-CA-TG | aTG/aCA | M/T | Partially changed missense |
| OR2T11 | 1-248790074-CA-TG | TGc/CAc | C/H | Changed missense |
| OR14I1 | 1-248845096-AC-GT | aGT/aAC | S/N | Unchanged |
| OR14I1 | 1-248845498-CA-TG | gTG/gCA | V/A | Unchanged |
| PFKP | 10-3155619-CA-TG | gCA/gTG | A/V | Unchanged |
| PITRM1 | 10-3181125-AC-GT | GTa/ACa | V/T | Changed missense |
| AKR1E2 | 10-4872910-AC-GT | gAC/gGT | D/G | Unchanged |
| AKR1C1 | 10-5010571-CA-TG | aCA/aTG | T/M | Changed missense |
| AKR1C4 | 10-5255024-CA-TG | CAa/TGa | Q/* | Unchanged |
| NET1 | 10-5498692-CA-TG | cCA/cTG | P/L | Unchanged |
| ECHDC3 | 10-11805353-CA-TG | gCA/gTG | A/V | Unchanged |
| ITGA8 | 10-15573050-AC-GT | GTa/ACa | V/T | Changed missense |
| PTER | 10-16547056-CAA-TAG | CaA/TaG | Q/* | Unchanged |
| CUBN | 10-16918972-AGC-GGT | GcT/AcC | A/T | Unchanged |
| NEBL | 10-21106620-AC-GT | GTa/ACa | V/T | Changed missense |
| EBLN1 | 10-22498208-CA-TG | aTG/aCA | M/T | Partially changed missense |
| ARMC3 | 10-23297299-AAC-GAT | AaC/GaT | N/D | Unchanged |
| ARMC3 | 10-23297300-AC-GT | aAC/aGT | N/S | Unchanged |
| KIAA1217 | 10-24762464-CA-TG | gCA/gTG | A/V | Unchanged |
| KIAA1217 | 10-24813326-CA-TG | aCA/aTG | T/M | Changed missense |
| GPR158 | 10-25888180-ATC-GTT | AtC/GtT | I/V | Unchanged |
| NRP1 | 10-33552695-CA-TG | gTG/gCA | V/A | Unchanged |
| RET | 10-43595967-CA-TG | gCA/gTG | A/V | Unchanged |
| RET | 10-43606686-CA-TG | gCA/gTG | A/V | Unchanged |
| GPRIN2 | 10-47000187-CA-TG | cCA/cTG | P/L | Unchanged |
| ASAH2C | 10-48003991-AC-GT | tGT/tAC | C/Y | Unchanged |
| ZWINT | 10-58119595-AGC-GGT | GcT/AcC | A/T | Unchanged |
| TMEM26 | 10-63170290-CAA-TAG | TtG/CtA | L | Unchanged |
| ADAMTS14 | 10-72520329-CA-TG | gCA/gTG | A/V | Unchanged |
| UNC5B | 10-73046617-ATC-GTT | AtC/GtT | I/V | Unchanged |
| UNC5B | 10-73056495-CA-TG | gCA/gTG | A/V | Unchanged |
| RPS24 | 10-79814598-CA-TG | CAc/TGc | H/C | Changed missense |
| SFTPA1 | 10-81372080-CA-TG | cCA/cTG | P/L | Unchanged |
| NUTM2E | 10-81608367-CA-TG | CAg/TGg | Q/W | Rescued nonsense |
| SFTPD | 10-81706323-CA-TG | aTG/aCA | M/T | Partially changed missense |
| CDHR1 | 10-85960394-CA-TG | gCA/gTG | A/V | Unchanged |
| CEP55 | 10-95262981-AC-GT | ACa/GTa | T/V | Changed missense |
| PLCE1 | 10-96066341-AC-GT | cAC/cGT | H/R | Unchanged |
| R3HCC1L | 10-99969567-CA-TG | CAc/TGc | H/C | Changed missense |
| PYROXD2 | 10-100148175-CA-TG | aTG/aCA | M/T | Partially changed missense |
| HPS1 | 10-100202987-AC-GT | GTc/ACc | V/T | Changed missense |
| CWF19L1 | 10-102016043-AC-GT | tGT/tAC | C/Y | Unchanged |
| LZTS2 | 10-102766573-CA-TG | gCA/gTG | A/V | Unchanged |
| NRAP | 10-115352004-CA-TG | cTG/cCA | L/P | Unchanged |
| NRAP | 10-115411613-CA-TG | gTG/gCA | V/A | Unchanged |
| NRAP | 10-115411614-AC-GT | GTg/ACg | V/T | Changed missense |
| ATRNL1 | 10-117228793-CA-TG | aCA/aTG | T/M | Changed missense |
| WDR11 | 10-122649481-CA-TG | gCA/gTG | A/V | Unchanged |
| DMBT1 | 10-124348621-AC-GT | ACg/GTg | T/V | Changed missense |
| DMBT1 | 10-124358455-CA-TG | tCA/tTG | S/L | Unchanged |
| DMBT1 | 10-124358583-CA-TG | CAt/TGt | H/C | Changed missense |
| DMBT1 | 10-124402676-CA-TG | cCA/cTG | P/L | Unchanged |
| LHPP | 10-126172862-CA-TG | CAa/TGa | Q/* | Unchanged |
| CTBP2 | 10-126715153-CA-TG | cTG/cCA | L/P | Unchanged |
| DOCK1 | 10-128926011-CGA-TGG | CgA/TgG | R/W | Rescued nonsense |
| AL450307.1 | 10-133608209-CA-TG | TGc/CAc | C/H | Changed missense |
| JAKMIP3 | 10-133961493-AC-GT | cAC/cGT | H/R | Unchanged |
| STK32C | 10-134036193-AC-GT | cGT/cAC | R/H | Unchanged |
| LRRC27 | 10-134161631-CCA-TCG | CcA/TcG | P/S | Unchanged |
| LRRC27 | 10-134161632-CA-TG | cCA/cTG | P/L | Unchanged |
| PRAP1 | 10-135165789-CA-TG | CAt/TGt | H/C | Changed missense |
| SPRN | 10-135237060-AC-GT | gGT/gAC | G/D | Unchanged |
| CYP2E1 | 10-135342049-AC-TG | cAC/cTG | H/L | Partially changed missense |
| SCGB1C1 | 11-193721-CA-TG | aCA/aTG | T/M | Changed missense |
| PSMD13 | 11-237087-AC-GT | aAC/aGT | N/S | Unchanged |
| PSMD13 | 11-244166-AC-GT | aAC/aGT | N/S | Unchanged |
| ATHL1 | 11-290815-CA-TG | gCA/gTG | A/V | Unchanged |
| ANO9 | 11-428384-CA-TG | TGc/CAc | C/H | Changed missense |
| MUC6 | 11-1017755-CA-TG | cTG/cCA | L/P | Unchanged |
| MUC2 | 11-1075678-AC-GT | aAC/aGT | N/S | Unchanged |
| MUC5B | 11-1264361-CA-TG | aCA/aTG | T/M | Changed missense |
| MUC5B | 11-1264631-AC-GT | aAC/aGT | N/S | Unchanged |
| MUC5B | 11-1267619-CA-TG | aCA/aTG | T/M | Changed missense |
| BRSK2 | 11-1481930-ACC-GCT | AcC/GcT | T/A | Unchanged |
| MOB2 | 11-1507730-CA-TG | cTG/cCA | L/P | Unchanged |
| OR51F1 | 11-4790671-CA-TG | tTG/LCA | L/S | Unchanged |
| OR51B2 | 11-5345169-CA-TG | TGt/CAt | C/H | Changed missense |
| OR51B5 | 11-5364692-AGC-GGT | GcT/AcC | A/T | Unchanged |
| OR52D1 | 11-5510283-CA-TG | tCA/tTG | S/L | Unchanged |
| OR52H1 | 11-5566029-CA-TG | TGc/CAc | C/H | Changed missense |
| OR52B6 | 11-5602614-CA-TG | CAc/TGc | H/C | Changed missense |
| OR52B6 | 11-5602615-AC-GT | cAC/cGT | H/R | Unchanged |
| OR52L1 | 11-6007271-CA-TG | TGg/CAg | W/Q | Rescued nonsense |
| OR52L1 | 11-6007679-CA-TG | TGc/CAc | C/H | Changed missense |
| OR52W1 | 11-6221168-CA-TG | CAt/TGt | H/C | Changed missense |
| DNHD1 | 11-6550003-CA-TG | CAg/TGg | Q/W | Rescued nonsense |
| OR2AG2 | 11-6789256-CA-TG | cTG/cCA | L/P | Unchanged |
| OR2AG1 | 11-6807200-CA-TG | cCA/cTG | P/L | Unchanged |
| ZNF214 | 11-7022159-CA-TG | TGt/CAt | C/H | Changed missense |
| OR10A6 | 11-7949349-CA-TG | cTG/cCA | L/P | Unchanged |
| TUB | 11-8122089-AGC-GGT | AgC/GgT | S/G | Unchanged |
| SWAP70 | 11-9754220-AC-GT | aAC/aGT | N/S | Unchanged |
| MRGPRX3 | 11-18159119-ATC-GTT | AtC/GtT | I/V | Unchanged |
| MRGPRX3 | 11-18159168-CA-TG | tCA/tTG | S/L | Unchanged |
| MRGPRX4 | 11-18194931-CA-TG | aCA/aTG | T/M | Changed missense |
| MRGPRX4 | 11-18195722-CA-TG | CAg/TGg | Q/W | Rescued nonsense |
| SAA4 | 11-18253176-CA-TG | TGc/CAc | C/H | Changed missense |
| SAA2 | 11-18267026-AC-GT | cGT/cAC | R/H | Unchanged |
| IGSF22 | 11-18738280-AC-GT | GTt/ACt | V/T | Changed missense |
| SLC6A5 | 11-20639399-CA-TG | tCA/tTG | S/L | Unchanged |
| SLC5A12 | 11-26702721-CA-TG | gTG/gCA | V/A | Unchanged |
| NAT10 | 11-34130341-CA-TG | tCA/tTG | S/L | Unchanged |
| LDLRAD3 | 11-36103227-CA-TG | cCA/cTG | P/L | Unchanged |
| RAG1 | 11-36597733-CA-TG | gCA/gTG | A/V | Unchanged |
| C11orf96 | 11-43946967-AC-GT | ACg/GTg | T/V | Changed missense |
| DGKZ | 11-46387867-CA-TG | CAg/TGg | Q/W | Rescued nonsense |
| DGKZ | 11-46397675-CA-GT | CAc/GTc | H/V | Changed missense |
| OR4S1 | 11-48328642-AAC-GAT | AaC/GaT | N/D | Unchanged |
| TRIM64C | 11-49080503-CA-TG | tTG/tCA | L/S | Unchanged |
| OR4C46 | 11-51515639-CA-TG | CAc/TGc | H/C | Changed missense |
| OR4C16 | 11-55339829-AC-GT | ACc/GTg | T/V | Changed missense |
| OR4C16 | 11-55339829-ACC-GCT | AcC/GcT | T/A | Unchanged |
| OR5L1 | 11-55579340-CA-TG | aCA/aTG | T/M | Changed missense |
| OR5F1 | 11-55761220-AC-GT | aGT/aAC | S/N | Unchanged |
| OR5J2 | 11-55944778-CA-TG | CAc/TGc | H/C | Changed missense |
| OR8U1 | 11-56143157-CA-TG | CAt/TGt | H/C | Changed missense |
| OR8U1 | 11-56143976-CA-TG | CAg/TGg | Q/W | Rescued nonsense |
| OR5R1 | 11-56185344-CA-TG | TGc/CAc | C/H | Changed missense |
| OR1S1 | 11-57982619-CA-TG | CAc/TGc | H/C | Changed missense |
| OR5B12 | 11-58207203-CA-TG | TGc/CAc | C/H | Changed missense |
| FAM111A | 11-58919812-CA-TG | gCA/gTG | A/V | Unchanged |
| OR4D10 | 11-59245494-CTA-TTG | CtA/TtG | L | Unchanged |
| MS4A4A | 11-60059738-CA-TG | CAg/TGg | Q/W | Rescued nonsense |
| CD5 | 11-60892605-CA-TG | CAc/TGc | H/C | Changed missense |
| SLC22A24 | 11-62848568-CA-GT | gTG/gAC | V/D | Changed missense |
| NUDT22 | 11-63997328-CA-TG | CAg/TGg | Q/W | Rescued nonsense |
| PLCB3 | 11-64022458-CA-TG | cCA/cTG | P/L | Unchanged |
| SLC22A12 | 11-64367324-CA-TG | gCA/gTG | A/V | Unchanged |
| TMEM262 | 11-64856498-CCA-TCG | TgG/CgA | W/R | Rescued nonsense |
| TMEM262 | 11-64856499-CA-TG | TGg/CAg | W/Q | Rescued nonsense |
| PCNXL3 | 11-65385605-CA-TG | CAg/TGg | Q/W | Rescued nonsense |
| SPTBN2 | 11-66468468-CA-TG | gTG/gCA | V/A | Unchanged |
| TBC1D10C | 11-67176897-CA-TG | tCA/tTG | S/L | Unchanged |
| GPR152 | 11-67218909-AGC-GGT | GcT/AcC | A/T | Unchanged |
| AIP | 11-67258390-CA-TG | CAg/TGg | Q/W | Rescued nonsense |
| ALDH3B2 | 11-67434160-CA-TG | aTG/aCA | M/T | Partially changed missense |
| ALDH3B1 | 11-67789137-AC-GT | tAC/tGT | Y/C | Unchanged |
| IGHMBP2 | 11-68703959-AC-GT | ACg/GTg | T/V | Changed missense |
| ANO1 | 11-70007391-CA-TG | gCA/gTG | A/V | Unchanged |
| PPFIA1 | 11-70221159-CA-TG | gCA/gTG | A/V | Unchanged |
| DHCR7 | 11-71146691-ATC-GTT | GaT/AaC | D/N | Unchanged |
| DEFB1Q8B | 11-71548543-CA-TG | CAa/TGa | Q/* | Unchanged |
| FOLR1 | 11-71907094-CA-TG | cCA/cTG | P/L | Unchanged |
| PDE2A | 11-72293602-ATC-GTT | GaT/AaC | D/N | Unchanged |
| PLEKHB1 | 11-73371892-AC-GT | tAC/tGT | Y/C | Unchanged |
| XRRA1 | 11-74554492-AC-GT | GTc/ACc | V/T | Changed missense |
| FAT3 | 11-92531355-CA-TG | CAg/TGg | Q/W | Rescued nonsense |
| KIAA1731 | 11-93402005-CA-TG | gCA/gTG | A/V | Unchanged |
| PIWIL4 | 11-94318670-CA-TG | cCA/cTG | P/L | Unchanged |
| KDM4E | 11-94759058-CA-TG | CAg/TGg | Q/W | Rescued nonsense |
| ARHGAP42 | 11-100846935-CA-TG | cCA/cTG | P/L | Unchanged |
| ARHGAP42 | 11-100847049-CA-TG | tCA/tTG | S/L | Unchanged |
| DYNC2H1 | 11-103057046-CGA-TGG | CgA/TgG | R/W | Rescued nonsense |
| EXPH5 | 11-108383675-CA-TG | cTG/cCA | L/P | Unchanged |
| ZC3H12C | 11-110035260-CGA-TGG | CgA/TgG | R/W | Rescued nonsense |
| LAYN | 11-111420363-CA-TG | cCA/cTG | P/L | Unchanged |
| BUD13 | 11-116627892-CA-TG | TGg/CAg | W/Q | Rescued nonsense |
| BACE1 | 11-117160346-CA-TG | TGc/CAc | C/H | Changed missense |
| CEP164 | 11-117252437-AC-GT | cAC/cGT | H/R | Unchanged |
| CEP164 | 11-117267883-CA-TG | CAg/TGg | Q/W | Rescued nonsense |
| IL10RA | 11-117864046-CA-TG | gCA/gTG | A/V | Unchanged |
| AMICA1 | 11-118074337-AC-GT | GTg/ACg | V/T | Changed missense |
| TMEM25 | 11-118405067-CA-TG | CAa/TGa | Q/* | Unchanged |
| BCL9L | 11-118771746-CA-TG | gTG/gCA | V/A | Unchanged |
| VPS11 | 11-118947633-AC-GT | tAC/tGT | Y/C | Unchanged |
| HINFP | 11-119005086-ATC-GTT | AtC/GtT | I/V | Unchanged |
| TRIM29 | 11-119999189-CAA-TAG | TtG/CtA | L | Unchanged |
| OAF | 11-120099658-AC-GT | cAC/cGT | H/R | Unchanged |
| POU2F3 | 11-120175748-CA-TG | CAc/TGc | H/C | Changed missense |
| TECTA | 11-120996291-CA-TG | gCA/gTG | A/V | Unchanged |
| UBASH3B | 11-122665436-CA-TG | tCA/tTG | S/L | Unchanged |
| ZNF202 | 11-123600474-CA-TG | gTG/gCA | V/A | Unchanged |
| OR6T1 | 11-123814489-AC-GT | aGT/aAG | S/N | Unchanged |
| OR10G4 | 11-123886319-CA-TG | aCA/aTG | T/M | Changed missense |
| OR10G4 | 11-123886795-CA-TG | CAg/TGg | Q/W | Rescued nonsense |
| OR10D3 | 11-124056581-AC-GT | aAC/aGT | N/S | Unchanged |
| OR8B4 | 11-124294235-CA-TG | TGt/CAt | C/H | Changed missense |
| ST14 | 11-130066334-AC-GT | aAC/aGT | N/S | Unchanged |
| WNK1 | 12-939301-CA-TG | gCA/gTG | A/V | Unchanged |
| TULP3 | 12-3046801-CA-TG | aCA/aTG | T/M | Changed missense |
| ANO2 | 12-6030404-CA-TG | gTG/gCA | V/A | Unchanged |
| CD163L1 | 12-7527123-CA-TG | aTG/aCA | M/T | Partially changed missense |
| A2ML1 | 12-9016572-CA-TG | CAc/TGc | H/C | Changed missense |
| PHC1 | 12-9086898-AC-GT | ACt/GTt | T/V | Changed missense |
| CLEC12B | 12-10165468-CA-TG | aCA/aTG | T/M | Changed missense |
| KLRC3 | 12-10570965-CA-GT | TGt/ACt | C/T | Changed missense |
| NKG2-E | 12-10570965-CA-GT | TGt/ACt | C/T | Changed missense |
| KLRC3 | 12-10573093-CCA-TCG | TgG/CgA | W/R | Rescued nonsense |
| TAS2R9 | 12-10962114-CA-TG | gTG/gCA | V/A | Unchanged |
| PLBD1 | 12-14688643-AC-GT | GTc/ACc | V/T | Changed missense |
| SMCO3 | 12-14959469-CA-TG | TGc/CAc | C/H | Changed missense |
| SMCO2 | 12-27648785-CA-TG | gCA/gTG | A/V | Unchanged |
| VDR | 12-48272894-CA-TG | aTG/aCA | M/T | Partially changed missense |
| PFKM | 12-48527184-ACC-GCT | AcC/GcT | T/A | Unchanged |
| OR10AD1 | 12-48597052-CA-TG | gTG/gCA | V/A | Unchanged |
| CCDC65 | 12-49308283-CA-TG | CAc/TGc | H/C | Changed missense |
| CERS5 | 12-50537814-CA-TG | TGt/CAt | C/H | Changed missense |
| ANKRD33 | 12-52284499-CA-TG | CAg/TGg | Q/W | Rescued nonsense |
| KRT7 | 12-52631312-CA-TG | CAc/TGc | H/C | Changed missense |
| KRT84 | 12-52774234-CA-TG | TGc/CAc | C/H | Changed missense |
| KRT6C | 12-52863212-AC-GT | GTt/ACt | V/T | Changed missense |
| KRT79 | 12-53227802-CA-TG | tTG/tCA | L/S | Unchanged |
| C12orf10 | 12-53700847-AC-GT | ACt/GTt | T/V | Changed missense |
| C12orf10 | 12-53700859-CA-TG | CAc/TGc | H/C | Changed missense |
| OR10P1 | 12-5603161O-CA-TG | tCA/tTG | S/L | Unchanged |
| NACA | 12-57109791-CA-TG | cTG/cCA | L/P | Unchanged |
| SDR9C7 | 12-57324078-AC-GT | cGT/cAC | R/H | Unchanged |
| ARHGEF25 | 12-58010162-CA-TG | CAg/TGg | Q/W | Rescued nonsense |
| PTPRB | 12-70928724-ATC-GTT | GaT/AaC | D/N | Unchanged |
| TMEM19 | 12-72094692-AAC-GAT | AaC/GaT | N/D | Unchanged |
| TRHDE | 12-73014916-CA-TG | aCA/aTG | T/M | Changed missense |
| SYT1 | 12-79611373-AC-GT | aAC/aGT | N/S | Unchanged |
| METTL25 | 12-82792941-CA-TG | cCA/cTG | P/L | Unchanged |
| PLXNC1 | 12-94645254-CA-TG | aCA/aTG | T/M | Changed missense |
| CCDC41 | 12-94769758-AC-GT | cGT/cAC | R/H | Unchanged |
| C12orf55 | 12-97073470-CA-TG | CAt/TGt | H/C | Changed missense |
| MYBPC1 | 12-102069076-CA-TG | cCA/cTG | P/L | Unchanged |
| MYO1H | 12-109853348-CA-TG | cCA/cTG | P/L | Unchanged |
| IFT81 | 12-110618233-CGA-TGG | CgA/TgG | R/W | Rescued nonsense |
| HVCN1 | 12-111099002-CA-TG | aTG/aCA | M/T | Partially changed missense |
| DTX1 | 12-113532615-CGA-TGG | CgA/TgG | R/W | Rescued nonsense |
| TMEM233 | 12-120067643-ATC-GTT | AtC/GtT | I/V | Unchanged |
| COQ5 | 12-120966921-AGC-GGT | GcT/AcC | A/T | Unchanged |
| HIP1R | 12-123333064-AC-GT | tAC/tGT | Y/C | Unchanged |
| HIP1R | 12-123334441-AC-GT | tAC/tGT | Y/C | Unchanged |
| GTF2H3 | 12-124144394-CA-TG | cCA/cTG | P/L | Unchanged |
| DNAH10 | 12-124387585-CA-TG | gCA/gTG | A/V | Unchanged |
| SCARB1 | 12-125284748-AGC-GGT | GcT/AcC | A/T | Unchanged |
| TMEM132C | 12-128899672-CA-TG | CAc/TGc | H/C | Changed missense |
| TMEM132C | 12-128899673-AC-GT | cAC/cGT | H/R | Unchanged |
| TMEM132C | 12-129181809-CA-TG | aCA/aTG | T/M | Changed missense |
| GPR133 | 12-131620587-CA-TG | aCA/aTG | T/M | Changed missense |
| EP400 | 12-132528770-AC-GT | ACc/GTc | T/V | Changed missense |
| EP400 | 12-132528770-ACC-GCT | AcC/GcT | T/A | Unchanged |
| EP400 | 12-132549300-AC-GT | ACa/GTa | T/V | Changed missense |
| FGF9 | 13-22275393-CA-TG | tCA/tTG | S/L | Unchanged |
| TNFRSF19 | 13-24234516-CA-TG | tCA/tTG | S/L | Unchanged |
| C1QTNF9B | 13-24465716-CA-TG | gTG/gCA | V/A | Unchanged |
| C1QTNF9B | 13-24468328-CA-TG | TGt/CAt | C/H | Changed missense |
| PARP4 | 13-25008629-CA-TG | cTG/cCA | L/P | Unchanged |
| PARP4 | 13-25027743-CA-TG | aTG/aCA | M/T | Partially changed missense |
| ATP12A | 13-25265102-CA-TG | gCA/gTG | A/V | Unchanged |
| RNF17 | 13-25419175-CA-TG | aCA/aTG | T/M | Changed missense |
| SLC46A3 | 13-29287551-AC-GT | GTt/ACt | V/T | Changed missense |
| FRY | 13-32676113-CA-TG | aCA/aTG | T/M | Changed missense |
| BRCA2 | 13-32913053-CTA-TTG | CtA/TtG | L | Unchanged |
| POSTN | 13-38156519-AC-GT | GTg/ACc | V/T | Changed missense |
| PROSER1 | 13-39587676-CA-TG | gTG/gCA | V/A | Unchanged |
| MRPS31 | 13-41323395-ATC-GTT | GaT/AaC | D/N | Unchanged |
| TSC22D1 | 13-45148904-AC-GT | GTa/ACa | V/T | Changed missense |
| LRCH1 | 13-47308108-CA-TG | gCA/gTG | A/V | Unchanged |
| PHF11 | 13-50080845-CTA-TTG | CtA/TtG | L | Unchanged |
| ARL11 | 13-50205139-CA-TG | CAt/TGt | H/C | Changed missense |
| PCCA | 13-100888121-CA-TG | gCA/gTG | A/V | Unchanged |
| PCCA | 13-100955203-CA-TG | cCA/cTG | P/L | Unchanged |
| TMTC4 | 13-101287339-AC-GT | GTt/ACt | V/T | Changed missense |
| SLC10A2 | 13-103718468-CA-TG | tTG/tCA | L/S | Unchanged |
| PROZ | 13-113818899-CA-TG | aCA/aTG | T/M | Changed missense |
| CDC16 | 13-115016035-CA-TG | aCA/aTG | T/M | Changed missense |
| POTEG | 14-19566035-AC-GT | tAC/tGT | Y/C | Unchanged |
| POTEM | 14-20019783-AGC-GGT | GcT/AcC | A/T | Unchanged |
| OR4Q3 | 14-20215989-AC-GT | ACa/GTa | T/V | Changed missense |
| OR4L1 | 14-20528361-CA-TG | tCA/tTG | S/L | Unchanged |
| RPGRIP1 | 14-21770680-CA-TG | cCA/cTG | P/L | Unchanged |
| CHD8 | 14-21871653-CA-TG | gTG/gCA | V/A | Unchanged |
| OR4E2 | 14-22133996-CA-TG | CAg/TGg | Q/W | Rescued nonsense |
| TRAV27 | 14-22616546-CA-TG | gCA/gTG | A/V | Unchanged |
| TRAV36DV7 | 14-22695128-ATC-GTT | AtC/GtT | I/V | Unchanged |
| AE000662.92 | 14-23026575-AAC-GAT | AaC/GaT | N/D | Unchanged |
| OR6J1 | 14-23103354-AC-GT | cGT/cAC | R/H | Unchanged |
| THTPA | 14-24026492-CA-TG | CAc/TGc | H/C | Changed missense |
| AKAP6 | 14-33293021-CA-TG | gCA/gTG | A/V | Unchanged |
| MIA2 | 14-39703323-CA-TG | gCA/gTG | A/V | Unchanged |
| NIN | 14-51211072-AC-GT | tGT/tAC | O/Y | Unchanged |
| FRMD6 | 14-52186971-CA-TG | cCA/cTG | P/L | Unchanged |
| GPR137C | 14-53019944-AGC-GGT | AgC/GgT | S/G | Unchanged |
| BMP4 | 14-54417522-AC-GT | GTg/ACg | V/T | Changed missense |
| DAAM1 | 14-59798152-CTA-TTG | CtA/TtG | L | Unchanged |
| C14orf39 | 14-60923782-AC-GT | GTa/ACa | V/T | Changed missense |
| SYNE2 | 14-64522842-CA-TG | CAc/TGc | H/C | Changed missense |
| PLEKHH1 | 14-68042573-CA-TG | CAc/TGc | H/C | Changed missense |
| SLC8A3 | 14-70634087-AC-GT | cGT/cAC | R/H | Unchanged |
| ADAM21 | 14-70924566-CA-GT | gCA/gGT | A/G | Unchanged |
| DPF3 | 14-73220018-CAA-TAG | TtG/CtA | L | Unchanged |
| PAPLN | 14-73726150-CA-TG | CAc/TGc | H/C | Changed missense |
| ACOT2 | 14-74041747-CA-TG | CAc/TGc | H/C | Changed missense |
| TMEM63C | 14-77697966-CA-TG | gCA/gTG | A/V | Unchanged |
| TMEM63C | 14-77703056-CA-TG | gCA/gTG | A/V | Unchanged |
| RIN3 | 14-93118037-CA-TG | CAt/TGt | H/C | Changed missense |
| BDKRB2 | 14-96707456-CA-TG | aCA/aTG | T/M | Changed missense |
| VRK1 | 14-97299852-CA-TG | gCA/gTG | A/V | Unchanged |
| WDR25 | 14-100847706-CA-TG | CAt/TGt | H/C | Changed missense |
| EXOC3L4 | 14-103576414-CA-TG | CAg/TGg | Q/W | Rescued nonsense |
| KIF26A | 14-104642340-CA-TG | cCA/cTG | P/L | Unchanged |
| KIF26A | 14-104642421-CA-TG | gCA/gTG | A/V | Unchanged |
| KIF26A | 14-104643408-CA-TG | gCA/gTG | A/V | Unchanged |
| KIF26A | 14-104643857-CGA-TGG | CgA/TgG | R/W | Rescued nonsense |
| KIF26A | 14-104646062-AC-TG | ACc/TGc | T/C | Changed missense |
| C14orf180 | 14-105054933-CA-TG | cCA/cTG | P/L | Unchanged |
| INF2 | 14-105180705-CA-TG | cCA/cTG | P/L | Unchanged |
| AHNAK2 | 14-105408726-ATC-TTG | GaT/CaA | D/Q | Changed missense |
| AHNAK2 | 14-105408810-CA-TG | cTG/cCA | L/P | Unchanged |
| AHNAK2 | 14-105410775-ATC-GTT | GaT/AaC | D/N | Unchanged |
| AHNAK2 | 14-105411162-CA-TG | cTG/cCA | L/P | Unchanged |
| AHNAK2 | 14-105411204-AGC-GGT | GcT/AcC | A/T | Unchanged |
| AHNAK2 | 14-105411699-CA-TG | gTG/gCA | V/A | Unchanged |
| AHNAK2 | 14-105414474-CA-TG | aTG/aCA | M/T | Partially changed missense |
| AHNAK2 | 14-105414979-AC-GT | GTg/ACg | V/T | Changed missense |
| AHNAK2 | 14-105415122-CA-TG | cTG/cCA | L/P | Unchanged |
| AHNAK2 | 14-105415473-CA-TG | gTG/gCA | V/A | Unchanged |
| AHNAK2 | 14-105415515-CA-TG | gTG/gCA | V/A | Unchanged |
| AHNAK2 | 14-105415516-AC-GT | GTg/ACg | V/T | Changed missense |
| AHNAK2 | 14-105416454-CA-TG | aTG/aCA | M/T | Partially changed missense |
| AHNAK2 | 14-105416505-CA-TG | aTG/aCA | M/T | Partially changed missense |
| AHNAK2 | 14-105416958-CA-TG | gTG/gCA | V/A | Unchanged |
| AHNAK2 | 14-105416959-AC-GT | GTg/ACg | V/T | Changed missense |
| AHNAK2 | 14-105417144-AGC-GGT | GcT/AcC | A/T | Unchanged |
| AHNAK2 | 14-105417957-ACC-GCT | GgT/AgC | G/S | Unchanged |
| AHNAK2 | 14-105419736-CA-TG | tTG/tCA | L/S | Unchanged |
| IGHV1-2 | 14-106452816-CA-TG | TGg/CAg | W/Q | Rescued nonsense |
| IGHV1-3 | 14-106471267-CA-TG | aTG/aCA | M/T | Partially changed missense |
| IGHV2-5 | 14-106494195-CA-TG | gTG/gCA | V/A | Unchanged |
| IGHV1-8 | 14-106539280-AC-GT | aGT/aAC | S/N | Unchanged |
| IGHV1-8 | 14-106539367-CA-GT | gTG/gAC | V/D | Changed missense |
| IGHV3-9 | 14-106552480-CA-TG | aTG/aCA | M/T | Partially changed missense |
| IGHV1-18 | 14-106641758-AC-TG | gGT/gCA | G/A | Unchanged |
| IGHV4-31 | 14-106805440-AC-GT | tGT/tAC | C/Y | Unchanged |
| IGHV3-43 | 14-106926317-ACC-TCG | GgT/CgA | G/R | Unchanged |
| IGHV3-49 | 14-107013232-CA-GT | gTG/gAC | V/D | Changed missense |
| IGHV3-53 | 14-107049101-CA-TG | TGg/CAg | W/Q | Rescued nonsense |
| IGHV4-61 | 14-107095156-AGC-GGT | GcT/AcC | A/T | Unchanged |
| IGHV4-61 | 14-107095378-CGA-TGG | TcG/CcA | S/P | Unchanged |
| IGHV1-69 | 14-107170219-CA-GT | gTG/gAC | V/D | Changed missense |
| GOLGA8I | 15-23263596-AC-GT | cAC/cGT | H/R | Unchanged |
| RP11-467N20.5 | 15-23406386-CA-TG | TGt/CAt | C/H | Changed missense |
| GOLGA6L2 | 15-23688942-CCA-TCG | TgG/CgA | W/R | Rescued nonsense |
| GOLGA6L2 | 15-23688943-CA-TG | TGg/CAg | W/Q | Rescued nonsense |
| GOLGA8T | 15-30434160-CA-TG | CAg/TGg | Q/W | Rescued nonsense |
| CHRFAM7A | 15-30659682-AC-GT | GTg/ACg | V/T | Changed missense |
| TRPM1 | 15-31369122-CA-TG | aTG/aCA | M/T | Partially changed missense |
| GOLGA8K | 15-32686364-CA-TG | cTG/cCA | L/P | Unchanged |
| FMN1 | 15-33357261-CA-TG | cTG/cCA | L/P | Unchanged |
| RYR3 | 15-34113535-CA-TG | gCA/gTG | A/V | Unchanged |
| THBS1 | 15-39880822-AC-GT | ACa/GTa | T/V | Changed missense |
| FSIP1 | 15-39910430-CA-TG | TGt/CAt | C/H | Changed missense |
| EIF2AK4 | 15-40260064-CAA-GAT | CaA/GaT | Q/D | Changed missense |
| PAK6 | 15-40558481-CA-TG | CAt/TGt | H/C | Changed missense |
| SPINT1 | 15-41137111-AC-GT | aAC/aGT | N/S | Unchanged |
| MGA | 15-42026763-AC-GT | gAC/gGT | D/G | Unchanged |
| STRC | 15-43900291-AC-TG | GTt/CAt | V/H | Changed missense |
| DUOX2 | 15-45388098-CA-TG | gTG/gCA | V/A | Unchanged |
| DUOX1 | 15-45444517-CA-TG | aCA/aTG | T/M | Changed missense |
| MYO5C | 15-52531939-CAA-TAG | TtG/CtA | L | Unchanged |
| GCOM1 | 15-57918068-CA-TG | gCA/gTG | A/V | Unchanged |
| MYZAP | 15-57918068-CA-TG | gCA/gTG | A/V | Unchanged |
| TPM1 | 15-63354415-AC-GT | tAC/tGT | Y/C | Unchanged |
| TRIP4 | 15-64706331-CA-TG | cCA/cTG | P/L | Unchanged |
| PIF1 | 15-65113686-CA-TG | TGt/CAt | C/H | Changed missense |
| IGDCC3 | 15-65667724-AGC-GGT | GcT/AcC | A/T | Unchanged |
| KIF23 | 15-69728947-CCA-TCG | CcA/TcG | P/S | Unchanged |
| KIF23 | 15-69728948-CA-TG | cCA/cTG | P/L | Unchanged |
| SCAMP5 | 15-75305039-CA-TG | cCA/cTG | P/L | Unchanged |
| C15orf39 | 15-75498547-CA-TG | gCA/gTG | A/V | Unchanged |
| TMED3 | 15-79614417-CA-TG | gCA/gTG | A/V | Unchanged |
| IL16 | 15-81592801-CA-TG | aCA/aTG | T/M | Changed missense |
| GOLGA6L10 | 15-82637313-CA-TG | TGt/CAt | C/H | Changed missense |
| GOLGA6L10 | 15-82637397-CA-TG | TGt/CAt | C/H | Changed missense |
| GOLGA6L10 | 15-82637418-CA-TG | TGt/CAt | C/H | Changed missense |
| GOLGA6L18 | 15-82934618-CA-TG | TGt/CAt | C/H | Changed missense |
| GOLGA6L18 | 15-82934660-CA-TG | TGt/CAt | C/H | Changed missense |
| GOLGA6L18 | 15-82934744-CA-TG | TGt/CAt | C/H | Changed missense |
| GOLGA6L18 | 15-82934912-CA-TG | TGt/CAt | C/H | Changed missense |
| GOLGA6L19 | 15-83013600-CA-TG | TGt/CAt | C/H | Changed missense |
| C15orf40 | 15-83680286-CA-TG | TGc/CAc | C/H | Changed missense |
| ZNF592 | 15-85345509-CA-TG | cCA/cTG | P/L | Unchanged |
| SLC28A1 | 15-85478408-CAA-TAG | CaA/TaG | Q/* | Unchanged |
| AGBL1 | 15-86838496-AC-GT | gAC/gGT | D/G | Unchanged |
| AGBL1 | 15-87217612-CA-TG | CAa/TGa | Q/* | Unchanged |
| KIF7 | 15-90174789-CGA-TGG | TcG/CcA | S/P | Unchanged |
| MAN2A2 | 15-91452594-CA-TG | CAg/TGg | Q/W | Rescued nonsense |
| UNC45A | 15-91488184-AC-GT | ACc/GTc | T/V | Changed missense |
| UNC45A | 15-91489918-CA-TG | cCA/cTG | P/L | Unchanged |
| FAM169B | 15-98995079-CGA-TGG | TcG/CcA | S/P | Unchanged |
| SYNM | 15-99671491-CA-TG | CAg/TGg | Q/W | Rescued nonsense |
| ADAMTS17 | 15-100692844-CA-TG | aTG/aCA | M/T | Partially changed missense |
| LRRK1 | 15-101598312-ACC-GCT | AcC/GcT | T/A | Unchanged |
| RGS11 | 16-319510-CA-TG | aTG/aCA | M/T | Partially changed missense |
| NME4 | 16-450239-AC-GT | gAC/gGT | D/G | Unchanged |
| CAPN15 | 16-603470-CA-TG | cCA/cTG | P/L | Unchanged |
| C16orf11 | 16-614819-CGA-TGG | CgA/TgG | R/W | Rescued nonsense |
| PIGQ | 16-624114-AC-GT | ACg/GTg | T/V | Changed missense |
| WDR90 | 16-711904-CA-TG | cCA/cTG | P/L | Unchanged |
| CCDC78 | 16-774691-CA-TG | TGg/CAg | W/Q | Rescued nonsense |
| CHTF18 | 16-842449-AC-GT | aAC/aGT | N/S | Unchanged |
| SSTR5 | 16-1129911-CA-TG | cCA/cTG | P/L | Unchanged |
| CACNA1H | 16-1261218-CA-TG | tCA/tTG | S/L | Unchanged |
| CACNA1H | 16-1261221-CA-TG | tCA/tTG | S/L | Unchanged |
| CCDC154 | 16-1484472-CA-TG | cTG/cCA | L/P | Unchanged |
| CCDC154 | 16-1488646-AC-GT | cGT/cAC | R/H | Unchanged |
| TELO2 | 16-1545447-CA-TG | CAg/TGg | Q/W | Rescued nonsense |
| TELO2 | 16-1555588-CA-TG | CAg/TGg | Q/W | Rescued nonsense |
| ZNF598 | 16-2049002-CA-GT | TGt/ACt | C/T | Changed missense |
| ZNF598 | 16-2049639-CA-TG | aTG/aCA | M/T | Partially changed missense |
| E4F1 | 16-2285355-ATC-GTT | AtC/GtT | I/V | Unchanged |
| ABCA3 | 16-2374466-AC-GT | GTg/ACg | V/T | Changed missense |
| MEFV | 16-3297073-ATC-GTT | GaT/AaC | D/N | Unchanged |
| OR2C1 | 16-3405993-CA-TG | tCA/tTG | S/L | Unchanged |
| VASN | 16-4431201-CA-TG | aCA/aTG | T/M | Changed missense |
| C16orf71 | 16-4796392-CA-TG | CAg/TGg | Q/W | Rescued nonsense |
| ABAT | 16-8839953-CA-TG | CAg/TGg | Q/W | Rescued nonsense |
| CIITA | 16-11002926-CA-TG | CAg/TGg | Q/W | Rescued nonsense |
| CTD-3088G3.8 | 16-11588525-CA-TG | TGc/CAc | C/H | Changed missense |
| TNFRSF17 | 16-12060163-AC-GT | aAC/aGT | N/S | Unchanged |
| SNX29 | 16-12162968-CA-TG | cCA/cTG | P/L | Unchanged |
| NPIPA7 | 16-16481609-CA-TG | aCA/aTG | T/M | Changed missense |
| ACSM5 | 16-20441076-CA-TG | CAc/TGc | H/C | Changed missense |
| ACSM2A | 16-20489898-ATC-GTT | AtC/GtT | I/V | Unchanged |
| EEF2K | 16-22269866-CA-TG | CAa/TGa | Q/* | Unchanged |
| RBBP6 | 16-24583405-CA-TG | gCA/gTG | A/V | Unchanged |
| ZKSCAN2 | 16-25258654-CA-TG | TGg/CAg | W/Q | Rescued nonsense |
| NPIPB6 | 16-28354498-CA-TG | gTG/gCA | V/A | Unchanged |
| APOBR | 16-28508446-CA-TG | gCA/gTG | A/V | Unchanged |
| CTB-134H23.2 | 16-29057391-CA-TG | CAg/TGg | Q/W | Rescued nonsense |
| QPRT | 16-29708350-AC-GT | ACt/GTt | T/V | Changed missense |
| TAOK2 | 16-29998199-CA-TG | aCA/aTG | T/M | Changed missense |
| RNF40 | 16-30779715-CA-TG | CAg/TGg | Q/W | Rescued nonsense |
| KAT8 | 16-31141825-CA-TG | cCA/cTG | P/L | Unchanged |
| ZNF423 | 16-49672520-AC-GT | cGT/cAC | R/H | Unchanged |
| RP11-324D17.1 | 16-54279692-CA-TG | TGg/CAg | W/Q | Rescued nonsense |
| CES1 | 16-55844575-CA-TG | TGc/CAc | C/H | Changed missense |
| CES5A | 16-55897290-CA-GT | cTG/cAC | L/H | Changed missense |
| NLRC5 | 16-57068106-AC-GT | cAC/cGT | H/R | Unchanged |
| CNGB1 | 16-57957215-CA-TG | gTG/gCA | V/A | Unchanged |
| TEPP | 16-58019140-AC-GT | tAC/tGT | Y/C | Unchanged |
| NDRG4 | 16-58545425-CA-TG | tCA/tTG | S/L | Unchanged |
| DUS2 | 16-68088484-CA-TG | tCA/tTG | S/L | Unchanged |
| WWP2 | 16-69970328-CA-TG | aCA/aTG | T/M | Changed missense |
| SF3B3 | 16-70602219-ATC-GTT | AtC/GtT | I/V | Unchanged |
| HP | 16-72094490-CAA-GAT | CaA/GaT | Q/D | Changed missense |
| ZFHX3 | 16-72991714-CA-TG | gTG/gCA | V/A | Unchanged |
| BCAR1 | 16-75269267-AGC-GGT | GcT/AcC | A/T | Unchanged |
| CNTNAP4 | 16-76532582-CA-TG | CAg/TGg | Q/W | Rescued nonsense |
| PKD1L2 | 16-81213377-CA-TG | cTG/cCA | L/P | Unchanged |
| CDH13 | 16-83817018-CA-TG | gCA/gTG | A/V | Unchanged |
| OSGIN1 | 16-83999032-CA-TG | tCA/tTG | S/L | Unchanged |
| KCNG4 | 16-84270540-CA-TG | cTG/cCA | L/P | Unchanged |
| TLDC1 | 16-84520395-CA-TG | TGc/CAc | C/H | Changed missense |
| ZNF469 | 16-88502504-CA-TG | CAt/TGt | H/C | Changed missense |
| ZNF469 | 16-88505634-CA-TG | cCA/cTG | P/L | Unchanged |
| CYBA | 16-88709827-CA-TG | gTG/gCA | V/A | Unchanged |
| PIEZO1 | 16-88804734-AC-GT | GTc/ACc | V/T | Changed missense |
| RP11-36817.4 | 16-89751860-CA-TG | TGc/CAc | C/H | Changed missense |
| CDK10 | 16-89753128-CCA-GCT | CcA/GcT | P/A | Unchanged |
| MC1R | 16-89986607-CA-TG | aCA/aTG | T/M | Changed missense |
| TUBB3 | 16-89986607-CA-TG | aCA/aTG | T/M | Changed missense |
| DEF8 | 16-90020745-CA-GT | CAg/GTg | Q/V | Changed missense |
| GAS8 | 16-90109710-CA-TG | aCA/aTG | T/M | Changed missense |
| MYO1C | 17-1384066-AC-GT | gGT/gAC | G/D | Unchanged |
| MYO1C | 17-1384066-ACC-GCT | GgT/AgC | G/S | Unchanged |
| WDR81 | 17-1637073-CA-TG | cCA/cTG | P/L | Unchanged |
| OR1E2 | 17-3337056-CA-TG | TGc/CAc | C/H | Changed missense |
| ZZEF1 | 17-3981289-CA-TG | gTG/gCA | V/A | Unchanged |
| KIF1C | 17-4926881-CA-TG | cCA/cTG | P/L | Unchanged |
| WSCD1 | 17-6014175-CA-TG | aCA/aTG | T/M | Changed missense |
| ALOX12 | 17-6902759-CA-TG | CAg/TGg | Q/W | Rescued nonsense |
| SLC16A13 | 17-6941624-AC-GT | tAC/tGT | Y/C | Unchanged |
| ACAP1 | 17-7245370-CA-TG | cCA/cTG | P/L | Unchanged |
| AURKB | 17-8108330-CA-TG | aTG/aCA | M/T | Partially changed missense |
| MYH8 | 17-10297657-CA-TG | TGg/CAg | W/Q | Rescued nonsense |
| DNAH9 | 17-11523081-CA-TG | CAa/TGa | Q/* | Unchanged |
| DNAH9 | 17-11648331-AC-GT | aAC/aGT | N/S | Unchanged |
| COX10 | 17-14095308-CA-TG | cCA/cTG | P/L | Unchanged |
| TBC1D26 | 17-15640814-CA-TG | CAc/TGc | H/C | Changed missense |
| TBC1D26 | 17-15640815-AC-GT | cAC/cGT | H/R | Unchanged |
| CCDC144A | 17-16593796-AGC-GGT | AgC/GgT | S/G | Unchanged |
| RP11-219A15.1 | 17-16593796-AGC-GGT | AgC/GgT | S/G | Unchanged |
| LLGL1 | 17-18137141-AGC-GGT | AgC/GgT | S/G | Unchanged |
| LGALS9 | 17-25975991-AC-TG | ACc/TGc | T/C | Changed missense |
| SEZ6 | 17-27284442-CA-TG | aTG/aCA | M/T | Partially changed missense |
| ANKRD13B | 17-27938606-CA-GT | aCA/aGT | T/S | Changed missense |
| NF1 | 17-29556425-CA-TG | cCA/cTG | P/L | Unchanged |
| ARHGAP23 | 17-36646385-CA-TG | gCA/gTG | A/V | Unchanged |
| KRT28 | 17-38956006-CA-TG | TGt/CAt | C/H | Changed missense |
| KRT40 | 17-39137103-CA-TG | aTG/aCA | M/T | Partially changed missense |
| KRTAP4-16P | 17-39258040-AC-GT | GTc/ACc | V/T | Changed missense |
| KRTAP4-12 | 17-39279920-CA-TG | TGc/CAc | C/H | Changed missense |
| KRTAP9-4 | 17-39406244-AC-GT | gAC/gGT | D/G | Unchanged |
| KRT36 | 17-39646021-AC-GT | cGT/cAC | R/H | Unchanged |
| COASY | 17-40716519-CA-TG | aCA/aTG | T/M | Changed missense |
| NBR1 | 17-41361959-CA-TG | CAt/TGt | H/C | Changed missense |
| ASB16 | 17-42248344-CAA-GAT | CaA/GaT | Q/D | Changed missense |
| SPPL2C | 17-43923897-OA-TG | tCA/tTG | S/L | Unchanged |
| KANSL1 | 17-44248736-CA-TG | tTG/tCA | L/S | Unchanged |
| LRRC37A | 17-44374709-CA-TG | cCA/cTG | P/L | Unchanged |
| LRRC37A | 17-44408406-AC-GT | ACg/GTg | T/V | Changed missense |
| EPX | 17-56272388-CGA-TGG | CgA/TgG | R/W | Rescued nonsense |
| TRIM37 | 17-57094674-CA-GT | TGt/ACt | C/T | Changed missense |
| SMG8 | 17-57287453-CA-TG | gCA/gTG | A/V | Unchanged |
| TUBD1 | 17-57963536-CA-TG | aTG/aCA | M/T | Partially changed missense |
| MED13 | 17-60059900-CA-GT | TGt/ACt | C/T | Changed missense |
| TLK2 | 17-60683502-CA-TG | cCA/cTG | P/L | Unchanged |
| ACE | 17-61564051-CA-TG | gCA/gTG | A/V | Unchanged |
| APOH | 17-64216814-AC-GT | cGT/cAC | R/H | Unchanged |
| NOL11 | 17-65739626-CA-TG | gCA/gTG | A/V | Unchanged |
| SLC16A6 | 17-66267530-CA-TG | cTG/cCA | L/P | Unchanged |
| ARSG | 17-66391231-CA-TG | cCA/cTG | P/L | Unchanged |
| FAM20A | 17-66533654-CA-TG | tTG/tCA | L/S | Unchanged |
| ABCA8 | 17-66899568-AC-GT | GTc/ACc | V/T | Changed missense |
| ABCA10 | 17-67178315-CA-TG | aTG/aCA | M/T | Partially changed missense |
| COG1 | 17-71192872-CA-TG | gCA/gTG | A/V | Unchanged |
| TTYH2 | 17-72248482-CA-TG | gCA/gTG | A/V | Unchanged |
| CD300A | 17-72469957-CA-TG | cCA/cTG | P/L | Unchanged |
| CD300LF | 17-72700943-AC-GT | GTc/ACc | V/T | Changed missense |
| NAT9 | 17-72769738-CA-TG | TGc/CAc | C/H | Changed missense |
| GGA3 | 17-73236124-ATC-GTT | GaT/AaC | D/N | Unchanged |
| KIAA0195 | 17-73488792-ATC-GTT | AtC/GtT | I/V | Unchanged |
| UNK | 17-73812908-CA-TG | cCA/cTG | P/L | Unchanged |
| TEN1 | 17-73987651-AC-GT | cAC/cGT | H/R | Unchanged |
| EVPL | 17-74017822-AC-GT | GTg/ACg | V/T | Changed missense |
| QRICH2 | 17-74289704-CA-TG | tTG/tCA | L/S | Unchanged |
| ST6GALNAC1 | 17-74625685-CA-TG | gTG/gCA | V/A | Unchanged |
| FLJ45079 | 17-75878090-AC-GT | GTg/ACg | V/T | Changed missense |
| ENCASE | 17-77078107-CGA-TGG | CgA/TgG | R/W | Rescued nonsense |
| CCDC40 | 17-78073561-CA-TG | cCA/cTG | P/L | Unchanged |
| RNF213 | 17-78261804-CA-TG | cCA/cTG | P/L | Unchanged |
| RPTOR | 17-78865629-CA-TG | gCA/gTG | A/V | Unchanged |
| AZI1 | 17-79171966-CA-TG | gTG/gCA | V/A | Unchanged |
| AZI1 | 17-79171967-AC-GT | GTg/ACg | V/T | Changed missense |
| RP11-1055B8.7 | 17-79409309-AC-GT | ACg/GTg | T/V | Changed missense |
| RP11-1055B8.7 | 17-79409432-CCA-TCG | CcA/TcG | P/S | Unchanged |
| RP11-1055B8.7 | 17-79414307-ACC-GCT | AcC/GcT | T/A | Unchanged |
| RP11-1055B8.7 | 17-79424516-ACC-GCT | AcC/GcT | T/A | Unchanged |
| CCDC57 | 17-80159713-CA-TG | cTG/cCA | L/P | Unchanged |
| OGFOD3 | 17-80352346-AC-TG | gGT/gCA | G/A | Unchanged |
| OGFOD3 | 17-80352346-ACC-TCG | GgT/CgA | G/R | Unchanged |
| HEXDC | 17-80391684-ATC-GTT | AtC/GtT | I/V | Unchanged |
| METRNL | 17-81043037-CCA-TCG | CcA/TcG | P/S | Unchanged |
| METRNL | 17-81043038-CA-TG | cCA/cTG | P/L | Unchanged |
| SMCHD1 | 18-2740713-CA-TG | aCA/aTG | T/M | Changed missense |
| SMCHD1 | 18-2750476-CA-TG | gCA/gTG | A/V | Unchanged |
| TGIF1 | 18-3457538-CA-TG | cCA/cTG | P/L | Unchanged |
| SOGA2 | 18-8784611-CA-TG | CAg/TGg | Q/W | Rescued nonsense |
| TXNDC2 | 18-9887551-ATC-GTT | AtC/GtT | I/V | Unchanged |
| POTEC | 18-14537948-CA-TG | TGt/CAt | C/H | Changed missense |
| NPC1 | 18-21124945-CA-GT | aTG/aAC | M/N | Changed missense |
| HRH4 | 18-22056969-CA-TG | CAt/TGt | H/C | Changed missense |
| CDH2 | 18-25565082-AC-GT | cGT/cAC | R/H | Unchanged |
| DSG2 | 18-29125853-CA-TG | aCA/aTG | T/M | Changed missense |
| TRAPPC8 | 18-29497572-CA-TG | tTG/tCA | L/S | Unchanged |
| MOCOS | 18-33780019-CA-TG | CAc/TGc | H/C | Changed missense |
| MOCOS | 18-33785184-CA-TG | cCA/cTG | P/L | Unchanged |
| SETBP1 | 18-42533129-CA-TG | tCA/tTG | S/L | Unchanged |
| SLC14A1 | 18-43316537-CA-TG | cCA/cTG | P/L | Unchanged |
| CCDC11 | 18-47787601-AC-GT | cGT/cAC | R/H | Unchanged |
| ALPK2 | 18-56247402-AGC-GGT | GcT/AcC | A/T | Unchanged |
| SERPINB4 | 18-61305035-CA-TG | TGt/CAt | C/H | Changed missense |
| SERPINB3 | 18-61325815-AC-GT | GTt/ACt | V/T | Changed missense |
| SERPINB11 | 18-61387276-AC-GT | ACa/GTa | T/V | Changed missense |
| SERPINB8 | 18-61654462-CA-TG | CAc/TGc | H/C | Changed missense |
| DOK6 | 18-67365667-CA-TG | aCA/aTG | T/M | Changed missense |
| SALL3 | 18-76754465-AC-GT | tAC/tGT | Y/C | Unchanged |
| ADNP2 | 18-77893682-CA-TG | gCA/gTG | A/V | Unchanged |
| ODF3L2 | 19-464309-CA-TG | gTG/gCA | V/A | Unchanged |
| GZMM | 19-548573-CA-GT | CAc/GTc | H/V | Changed missense |
| POLRMT | 19-621712-AGC-GGT | GcT/AcC | A/T | Unchanged |
| R3HDM4 | 19-901506-CA-TG | cTG/cCA | L/P | Unchanged |
| ARID3A | 19-929752-CA-TG | cCA/cTG | P/L | Unchanged |
| TMEM259 | 19-1014377-AC-GT | cGT/cAC | R/H | Unchanged |
| ABCA7 | 19-1054058-CTA-TTG | CtA/TtG | L | Unchanged |
| HMHA1 | 19-1085965-CA-TG | aCA/aTG | T/M | Changed missense |
| BTBD2 | 19-1997363-AGC-GGT | GcT/AcC | A/T | Unchanged |
| ZNF554 | 19-2834372-AC-GT | tAC/tGT | Y/C | Unchanged |
| APBA3 | 19-3752873-CA-TG | TGc/CAc | C/H | Changed missense |
| PIAS4 | 19-4029011-AC-GT | cAC/cGT | H/R | Unchanged |
| SIRT6 | 19-4180835-AC-GT | aGT/aAC | S/N | Unchanged |
| MPND | 19-4357554-CA-TG | tCA/tTG | S/L | Unchanged |
| PLIN4 | 19-4511434-AGC-GGT | GcT/AcC | A/T | Unchanged |
| PLIN4 | 19-4511677-AGC-GGT | GcT/AcC | A/T | Unchanged |
| PLIN4 | 19-4512154-CA-TG | gTG/gCA | V/A | Unchanged |
| PLIN4 | 19-4512155-AC-GT | GTg/ACg | V/T | Changed missense |
| PLIN4 | 19-4513558-CA-TG | gTG/gCA | V/A | Unchanged |
| PLIN5 | 19-4525045-CA-TG | TGc/CAc | C/H | Changed missense |
| PTPRS | 19-5214696-CA-TG | TGt/CAt | C/H | Changed missense |
| EMR1 | 19-6913706-AC-GT | ACg/GTg | T/V | Changed missense |
| ZNF557 | 19-7083628-CA-TG | tCA/tTG | S/L | Unchanged |
| CTD-2207O23.3 | 19-7528733-CA-TG | CAg/TGg | Q/W | Rescued nonsense |
| ARHGEF18 | 19-7528733-CA-TG | CAg/TGg | Q/W | Rescued nonsense |
| CTD-3193O13.9 | 19-7934992-CA-TG | tTG/tCA | L/S | Unchanged |
| CTD-3193O13.9 | 19-7935583-CA-TG | tTG/tCA | L/S | Unchanged |
| CTD-3193O13.9 | 19-7936006-CA-TG | aTG/aCA | M/T | Partially changed missense |
| ACTL9 | 19-8808899-CA-TG | gTG/gCA | V/A | Unchanged |
| ACTL9 | 19-8808900-AC-GT | GTg/ACg | V/T | Changed missense |
| MUC16 | 19-9015670-CA-TG | TGc/CAc | C/H | Changed missense |
| MUC16 | 19-9017004-CA-TG | TGg/CAg | W/Q | Rescued nonsense |
| OR1M1 | 19-9204306-CA-TG | cCA/cTG | P/L | Unchanged |
| OR7G3 | 19-9236886-AAC-GAT | GfT/AtC | V/I | Unchanged |
| ZNF561 | 19-9721521-CA-TG | gTG/gCA | V/A | Unchanged |
| RAVER1 | 19-10439711-AC-GT | cGT/cAC | R/H | Unchanged |
| KRI1 | 19-10668672-CA-TG | cTG/cCA | L/P | Unchanged |
| AP1M2 | 19-10694676-AC-TG | GTa/CAa | V/Q | Changed missense |
| SLC44A2 | 19-10742169-CA-TG | CAa/TGa | Q/* | Unchanged |
| RGL3 | 19-11529440-AC-GT | gGT/gAC | G/D | Unchanged |
| ZNF440 | 19-11942362-AC-GT | aAC/aGT | N/S | Unchanged |
| ZNF442 | 19-12461211-CA-TG | aTG/aCA | M/T | Partially changed missense |
| ZNF799 | 19-12502456-CA-TG | cTG/cCA | L/P | Unchanged |
| MAST1 | 19-12985575-CA-TG | tCA/tTG | S/L | Unchanged |
| CD97 | 19-14499537-AAC-GAT | AaC/GaT | N/D | Unchanged |
| ILVBL | 19-15229993-ATC-GTT | GaT/AaC | D/N | Unchanged |
| CYP4F11 | 19-16034713-CA-TG | TGc/CAc | C/H | Changed missense |
| CPAMD8 | 19-17111296-CA-TG | aTG/aCA | M/T | Partially changed missense |
| MYO9B | 19-17283655-ATC-GTT | AtC/GtT | I/V | Unchanged |
| MYO9B | 19-17316955-CA-TG | CAg/TGg | Q/W | Rescued nonsense |
| ANKLE1 | 19-17395Q02-CA-TG | CAg/TGg | Q/W | Rescued nonsense |
| ANO8 | 19-17438642-AAC-GAT | GfT/AtC | V/I | Unchanged |
| TMEM221 | 19-17547291-CA-TG | aTG/aCA | M/T | Partially changed missense |
| PGLS | 19-17628586-CA-TG | aCA/aTG | T/M | Changed missense |
| MAP1S | 19-17837980-CA-TG | gCA/gTG | A/V | Unchanged |
| FCHO1 | 19-17885269-CA-TG | cCA/cTG | P/L | Unchanged |
| IFI30 | 19-18288067-CCA-TCG | CcA/TcG | P/S | Unchanged |
| KIAA1683 | 19-18378218-CA-TG | cTG/cCA | L/P | Unchanged |
| SSBP4 | 19-18542200-AC-GT | aAC/aGT | N/S | Unchanged |
| ZNF737 | 19-20735343-CA-TG | TGt/CAt | C/H | Changed missense |
| ZNF85 | 19-21117760-AC-GT | ACt/GTt | T/V | Changed missense |
| ZNF99 | 19-22952110-CA-TG | TGg/CAg | W/Q | Rescued nonsense |
| RPSAP58 | 19-24010780-AC-GT | ACg/GTg | T/V | Changed missense |
| GPATCH1 | 19-33605299-CA-TG | CAt/TGt | H/C | Changed missense |
| FXYD5 | 19-35649280-CA-TG | cCA/cTG | P/L | Unchanged |
| FAM187B | 19-35719105-CA-TG | TGt/CAt | C/H | Changed missense |
| DMKN | 19-36004106-AC-GT | GTa/ACa | V/T | Changed missense |
| ATP4A | 19-36050968-CA-TG | gTG/gCA | V/A | Unchanged |
| ATP4A | 19-36050969-AC-GT | GTg/ACg | V/T | Changed missense |
| KMT2B | 19-36221352-AC-GT | aAC/aGT | N/S | Unchanged |
| ZNF567 | 19-37210804-AC-GT | tAC/tGT | Y/C | Unchanged |
| ZNF850 | 19-37240509-CA-TG | TGt/CAt | C/H | Changed missense |
| ZNF568 | 19-37441979-CA-TG | CAa/TGa | Q/* | Unchanged |
| ZNF527 | 19-37879588-CA-TG | CAt/TGt | H/C | Changed missense |
| RASGRP4 | 19-38905683-AC-GT | gGT/gAC | G/D | Unchanged |
| RYR1 | 19-38993546-AC-GT | cAC/cGT | H/R | Unchanged |
| CAPN12 | 19-39229088-CA-TG | TGc/CAc | C/H | Changed missense |
| IFNL4 | 19-39739170-CA-TG | TGc/CAc | C/H | Changed missense |
| IFNL2 | 19-39760191-ACC-GCT | AcC/GcT | T/A | Unchanged |
| SHKBP1 | 19-41096188-CA-TG | aCA/aTG | T/M | Changed missense |
| CYP2A6 | 19-41351304-CA-TG | aTG/aCA | M/T | Partially changed missense |
| CYP2A7 | 19-41383200-CA-TG | aTG/aCA | M/T | Partially changed missense |
| CYP2A13 | 19-41600231-CA-TG | aCA/aTG | T/M | Changed missense |
| CYP2F1 | 19-41633926-CA-TG | cCA/cTG | P/L | Unchanged |
| AXL | 19-41743861-AAC-GAT | AaC/GaT | N/D | Unchanged |
| HNRNPUL1 | 19-41809994-CA-TG | cCA/cTG | P/L | Unchanged |
| PSG3 | 19-43243216-CA-TG | tTG/tCA | L/S | Unchanged |
| PSG3 | 19-43243216-CAA-TAG | TtG/CtA | L | Unchanged |
| PSG6 | 19-43414959-AC-GT | GTc/ACc | V/T | Changed missense |
| PSG6 | 19-43420614-CA-TG | cTG/cCA | L/P | Unchanged |
| PSG11 | 19-43529025-AC-GT | GTa/ACa | V/T | Changed missense |
| PSG2 | 19-43585373-CA-TG | cTG/cCA | L/P | Unchanged |
| PSG5 | 19-43679410-AGC-GGT | GcT/AcC | A/T | Unchanged |
| PSG5 | 19-43680299-CA-TG | cTG/cCA | L/P | Unchanged |
| TEX101 | 19-43922060-CA-TG | cCA/cTG | P/L | Unchanged |
| ZNF224 | 19-44610842-AC-GT | ACg/GTg | T/V | Changed missense |
| ZNF285 | 19-44891838-CA-TG | TGt/CAt | C/H | Changed missense |
| ZNF285 | 19-44891849-AC-GT | aGT/aAC | S/N | Unchanged |
| PVRL2 | 19-45389223-CA-TG | cCA/cTG | P/L | Unchanged |
| HIF3A | 19-46811983-CA-TG | aCA/aTG | T/M | Changed missense |
| HIF3A | 19-46823701-CA-TG | CAg/TGg | Q/W | Rescued nonsense |
| PRKD2 | 19-47177912-CA-TG | gTG/gCA | V/A | Unchanged |
| PRKD2 | 19-47177913-AC-GT | GTg/ACg | V/T | Changed missense |
| GLTSCR2 | 19-48255803-CA-TG | gCA/gTG | A/V | Unchanged |
| GRIN2D | 19-48946404-CA-TG | cCA/cTG | P/L | Unchanged |
| FUT2 | 19-49206416-CA-TG | gCA/gTG | A/V | Unchanged |
| FUT2 | 19-49207205-CA-TG | aCA/aTG | T/M | Changed missense |
| KCNA7 | 19-49575618-ACC-GCT | GgT/AgC | G/S | Unchanged |
| HRC | 19-49658099-AC-GT | cGT/cAC | R/H | Unchanged |
| NUP62 | 19-50411742-ATC-GTT | GaT/AaC | D/N | Unchanged |
| MYH14 | 19-50762417-CA-TG | cCA/cTG | P/L | Unchanged |
| KLK1 | 19-51323501-ATC-GTT | GaT/AaC | D/N | Unchanged |
| KLK3 | 19-51359502-CA-TG | gCA/gTG | A/V | Unchanged |
| KLK10 | 19-51519235-CA-TG | cTG/cCA | L/P | Unchanged |
| SIGLEC12 | 19-52000155-AGC-GGT | GcT/AcC | A/T | Unchanged |
| SIGLEC5 | 19-52133292-AC-GT | GTt/ACt | V/T | Changed missense |
| ZNF480 | 19-52825234-CA-TG | tCA/tTG | S/L | Unchanged |
| ZNF534 | 19-52942445-CA-TG | CAc/TGc | H/C | Changed missense |
| ZNF808 | 19-53056374-CA-TG | CAc/TGc | H/C | Changed missense |
| ZNF701 | 19-53085565-AC-TG | ACt/TGt | T/C | Changed missense |
| ZNF600 | 19-53270383-CA-TG | TGt/CAt | C/H | Changed missense |
| ZNF28 | 19-53303526-CA-TG | aTG/aCA | M/T | Partially changed missense |
| ERVV-2 | 19-53554074-CA-TG | CAa/TGa | Q/* | Unchanged |
| VN1R2 | 19-53761764-ACC-GCT | AcC/GcT | T/A | Unchanged |
| BIRC8 | 19-53793574-AAC-GAT | GtT/AtC | V/I | Unchanged |
| ZNF765 | 19-53911973-AGC-TGG | AgC/TgG | S/W | Changed missense |
| LILRB3 | 19-54721215-CA-TG | gTG/gCA | V/A | Unchanged |
| LILRB3 | 19-54725744-CA-TG | TGg/CAg | W/Q | Rescued nonsense |
| LILRA6 | 19-54745906-CA-TG | aTG/aCA | M/T | Partially changed missense |
| LILRB2 | 19-54782385-CA-TG | gTG/gCA | V/A | Unchanged |
| LILRB2 | 19-54782406-AC-GT | cGT/cAC | R/H | Unchanged |
| LILRA4 | 19-54844856-CA-TG | TGg/CAg | W/Q | Rescued nonsense |
| LILRA4 | 19-54848383-CA-TG | gTG/gCA | V/A | Unchanged |
| LILRA1 | 19-55105726-CA-TG | aCA/aTG | T/M | Changed missense |
| LILRB1 | 19-55144184-AGC-GGT | AgC/GgT | S/G | Unchanged |
| LILRB4 | 19-55179216-CA-TG | gCA/gTG | A/V | Unchanged |
| KIR2DL1 | 19-55295125-AC-GT | ACa/GTa | T/V | Changed missense |
| PTPRH | 19-55708555-CAA-TAG | TtG/CtA | L | Unchanged |
| PTPRH | 19-55713614-ATC-GTT | GaT/AaC | D/N | Unchanged |
| ZNF628 | 19-55993260-ACC-GCT | AcC/GcT | T/A | Unchanged |
| ZNF628 | 19-55994652-CA-TG | CAg/TGg | Q/W | Rescued nonsense |
| SBK2 | 19-56047447-CA-TG | TGc/CAc | C/H | Changed missense |
| CCDC106 | 19-56162774-AGC-GGT | AgC/GgT | S/G | Unchanged |
| NLRP13 | 19-56407380-ATC-TTG | GaT/CaA | D/Q | Changed missense |
| ZSCAN5C | 19-56717341-CA-TG | tCA/tTG | S/L | Unchanged |
| ZSCAN5C | 19-56717352-CA-TG | CAg/TGg | Q/W | Rescued nonsense |
| ZSCAN5C | 19-56718584-CA-TG | CAa/TGa | Q/* | Unchanged |
| ZNF71 | 19-57133632-AC-GT | tAC/tGT | Y/C | Unchanged |
| ZNF460 | 19-57802805-AC-GT | aAC/aGT | N/S | Unchanged |
| ZNF749 | 19-57955243-CA-TG | CAg/TGg | Q/W | Rescued nonsense |
| ZSCAN4 | 19-58189713-CTA-TTG | CtA/TtG | L | Unchanged |
| ZNF544 | 19-58774070-CA-TG | CAa/TGa | Q/* | Unchanged |
| SNTG2 | 2-1271230-ATC-GTT | AtC/GtT | I/V | Unchanged |
| CMPK2 | 2-7005369-AC-GT | tGT/tAC | C/Y | Unchanged |
| TAF1B | 2-10045013-AC-GT | tAC/tGT | Y/C | Unchanged |
| DDX1 | 2-15747392-AC-GT | aAC/aGT | N/S | Unchanged |
| MSGN1 | 2-17998095-CA-TG | CAc/TGc | H/C | Changed missense |
| GPR113 | 2-26536692-AGC-GGT | GcT/AcC | A/T | Unchanged |
| EMILIN1 | 2-27306045-CA-TG | CAa/TGa | Q/* | Unchanged |
| CAD | 2-27460967-CA-TG | gCA/gTG | A/V | Unchanged |
| DNAJC5G | 2-27500852-AC-TG | tAC/tTG | Y/L | Rescued nonsense |
| WDR43 | 2-29152526-CCA-GCT | CcA/GcT | P/A | Unchanged |
| FAM179A | 2-29226511-CA-TG | CAg/TGg | Q/W | Rescued nonsense |
| FAM179A | 2-29240059-CA-TG | CAg/TGg | Q/W | Rescued nonsense |
| CLIP4 | 2-29356668-CA-TG | aCA/aTG | T/M | Changed missense |
| TTC27 | 2-32855613-CTA-TTG | CtA/TtG | L | Unchanged |
| LTBP1 | 2-33447201-AC-GT | aAC/aGT | N/S | Unchanged |
| RASGRP3 | 2-33764176-AC-GT | ACg/GTg | T/V | Changed missense |
| CYP1B1 | 2-38298150-ATC-GTT | GaT/AaC | D/N | Unchanged |
| CYP1B1 | 2-38298202-AC-TG | GTg/CAg | V/Q | Changed missense |
| ATL2 | 2-38604349-CCA-TCG | TgG/CgA | W/R | Rescued nonsense |
| SOCS5 | 2-46986415-CA-TG | aCA/aTG | T/M | Changed missense |
| MSH6 | 2-48018080-CA-TG | cCA/cTG | P/L | Unchanged |
| ERLEC1 | 2-54035445-CAA-TAG | CaA/TaG | Q/* | Unchanged |
| EML6 | 2-55040425-CA-TG | cCA/cTG | P/L | Unchanged |
| USP34 | 2-61575307-CA-TG | aTG/aCA | M/T | Partially changed missense |
| FAM161A | 2-62066927-AC-GT | tGT/tAC | C/Y | Unchanged |
| CEP68 | 2-65298838-CA-TG | aCA/aTG | T/M | Changed missense |
| CD207 | 2-71058834-CA-TG | gTG/gCA | V/A | Unchanged |
| CYP26B1 | 2-72361959-CA-TG | tTG/tCA | L/S | Unchanged |
| NAT8 | 2-73868150-AC-GT | tGT/tAC | C/Y | Unchanged |
| NAT8 | 2-73868151-CA-TG | TGt/CAt | C/H | Changed missense |
| LOXL3 | 2-74761469-CA-GT | TGt/ACt | C/T | Changed missense |
| HK2 | 2-75099475-CAA-GAT | CaA/GaT | Q/D | Changed missense |
| HK2 | 2-75113656-AC-GT | aAC/aGT | N/S | Unchanged |
| VAMP8 | 2-85808735-CGA-TGG | CgA/TgG | R/W | Rescued nonsense |
| IGKV4-1 | 2-89185467-AC-GT | aAC/aGT | N/S | Unchanged |
| IGKV5-2 | 2-89197074-AC-GT | aAC/aGT | N/S | Unchanged |
| IGKV5-2 | 2-89197190-CCA-TCG | CcA/TcG | P/S | Unchanged |
| IGKV1-5 | 2-89246936-AC-GT | aGT/aAC | S/N | Unchanged |
| IGKV1-9 | 2-89309660-CA-TG | TGg/CAg | W/Q | Rescued nonsense |
| IGKV3-11 | 2-89326866-AAC-GAT | GtT/AtC | V/I | Unchanged |
| IGKV1-12 | 2-89339910-CCA-TCG | TgG/CgA | W/R | Rescued nonsense |
| IGKV3-15 | 2-89384829-AGC-GGT | GcT/AcC | A/T | Unchanged |
| IGKV2-24 | 2-89475830-CA-TG | aTG/aCA | M/T | Partially changed missense |
| IGKV2D-28 | 2-89998840-CA-TG | CAg/TGg | Q/W | Rescued nonsense |
| FAHD2A | 2-96072753-CGA-TGG | CgA/TgG | R/W | Rescued nonsense |
| ITPRIPL1 | 2-96993883-CA-TG | cCA/cTG | P/L | Unchanged |
| FAM178B | 2-97638037-CA-TG | gTG/gCA | V/A | Unchanged |
| FAM178B | 2-97638038-AC-GT | GTg/ACg | V/T | Changed missense |
| FAHD2B | 2-97755996-CCA-TCG | TgG/CgA | W/R | Rescued nonsense |
| ANKRD36 | 2-979Q9726-CA-TG | gCA/gTG | A/V | Unchanged |
| RFX8 | 2-102018907-CA-TG | aTG/aCA | M/T | Partially changed missense |
| TGFBRAP1 | 2-105924510-AC-GT | cGT/cAC | R/H | Unchanged |
| RANBP2 | 2-109374951-CA-TG | tCA/tTG | S/L | Unchanged |
| MERTK | 2-112705142-CA-TG | cCA/cTG | P/L | Unchanged |
| MERTK | 2-112765972-CA-TG | tCA/tTG | S/L | Unchanged |
| GLI2 | 2-121747427-CCA-TCG | CcA/TcG | P/S | Unchanged |
| TUBA3E | 2-130949552-CA-TG | TGg/CAg | W/Q | Rescued nonsense |
| POTEI | 2-131220830-CA-TG | aTG/aCA | M/T | Partially changed missense |
| TUBA3D | 2-132237982-CA-TG | aCA/aTG | T/M | Changed missense |
| TUBA3D | 2-132238284-ACC-GCT | AcC/GcT | T/A | Unchanged |
| NCKAP5 | 2-133541574-AC-GT | GTc/ACc | V/T | Changed missense |
| THSD7B | 2-138417312-CA-TG | aCA/aTG | T/M | Changed missense |
| NMI | 2-152132128-CAA-TAG | TtG/CtA | L | Unchanged |
| RIF1 | 2-152322240-AC-TG | gAC/gTG | D/V | Partially changed missense |
| RIF1 | 2-152322332-AAC-GAT | AaC/GaT | N/D | Unchanged |
| NEB | 2-152483630-AGC-GGT | GcT/AcC | A/T | Unchanged |
| NEB | 2-152490457-CA-TG | TGc/CAc | C/H | Changed missense |
| TANC1 | 2-160086691-CA-TG | aCA/aTG | T/M | Changed missense |
| COBLL1 | 2-165551659-CA-GT | TGg/ACg | W/T | Changed missense |
| SCN9A | 2-167099157-CA-TG | TGg/CAg | W/Q | Rescued nonsense |
| METTL8 | 2-172180770-CA-TG | TGa/CAa | */Q | Unchanged |
| TTN | 2-179518002-CA-TG | tTG/tCA | L/S | Unchanged |
| TTN | 2-179620950-AC-GT | gGT/gAC | G/D | Unchanged |
| ZNF804A | 2-185800904-CA-GT | CAa/GTa | Q/V | Changed missense |
| ZNF804A | 2-185802362-CA-TG | CAc/TGc | H/C | Changed missense |
| FSIP2 | 2-186678632-AC-GT | ACt/GTt | T/V | Changed missense |
| ITGAV | 2-187540562-CA-GT | CAt/GTt | H/V | Changed missense |
| DIRC1 | 2-189599372-CA-TG | tTG/tCA | L/S | Unchanged |
| SLC40A1 | 2-190430177-AAC-GAT | GtT/AtC | V/I | Unchanged |
| MFSD6 | 2-191302004-AC-GT | ACa/GTa | T/V | Changed missense |
| NOP58 | 2-203149164-CCA-TCG | CcA/TcG | P/S | Unchanged |
| CPO | 2-207833982-CA-TG | aCA/aTG | T/M | Changed missense |
| CRYGB | 2-209010694-CA-GT | TGc/ACc | C/T | Changed missense |
| C2orf80 | 2-209036777-CA-TG | TGc/CAc | C/H | Changed missense |
| CPS1 | 2-211456637-ACC-GCT | AcC/GcT | T/A | Unchanged |
| ERBB4 | 2-212522512-CA-TG | TGg/CAg | W/Q | Rescued nonsense |
| TNS1 | 2-218674696-AC-GT | GTc/ACc | V/T | Changed missense |
| TNS1 | 2-218683153-CA-TG | TGg/CAg | W/Q | Rescued nonsense |
| RUFY4 | 2-218940395-CA-TG | CAa/TGa | Q/* | Unchanged |
| USP37 | 2-219319656-CA-TG | tTG/tCA | L/S | Unchanged |
| DNPEP | 2-220250146-CA-TG | gTG/gCA | V/A | Unchanged |
| SPEG | 2-220355528-CA-TG | CAc/TGc | H/C | Changed missense |
| TMEM198 | 2-220414015-AC-GT | gAC/gGT | D/G | Unchanged |
| SGPP2 | 2-223423360-CCA-TCG | CcA/TcG | P/S | Unchanged |
| SGPP2 | 2-223423361-CA-TG | cCA/cTG | P/L | Unchanged |
| COL4A3 | 2-228131169-AC-GT | cAC/cGT | H/R | Unchanged |
| AGFG1 | 2-228398421-CA-TG | gCA/gTG | A/V | Unchanged |
| AGFG1 | 2-228416711-CA-TG | aCA/aTG | T/M | Changed missense |
| SP110 | 2-231037616-ACC-GCT | GgT/AgC | G/S | Unchanged |
| SP140L | 2-231256811-CA-TG | gCA/gTG | A/V | Unchanged |
| CHRND | 2-233390936-CA-TG | cCA/cTG | P/L | Unchanged |
| USP40 | 2-234399822-CA-TG | cTG/cCA | L/P | Unchanged |
| UGT1A5 | 2-234621668-CA-TG | CAg/TGg | Q/W | Rescued nonsense |
| UGT1A4 | 2-234627743-AC-GT | ACg/GTg | T/V | Changed missense |
| UGT1A3 | 2-234638248-CA-TG | gCA/gTG | A/V | Unchanged |
| UGT1A8 | 2-234638248-CA-TG | gCA/gTG | A/V | Unchanged |
| SH3BP4 | 2-235949919-CA-TG | cCA/cTG | P/L | Unchanged |
| RAB17 | 2-238494741-CA-TG | gTG/gCA | V/A | Unchanged |
| LRRFIP1 | 2-238672326-AC-GT | gAC/gGT | D/G | Unchanged |
| ESPNL | 2-239039840-CA-TG | CAg/TGg | Q/W | Rescued nonsense |
| ASB1 | 2-239344573-AC-GT | aAC/aGT | N/S | Unchanged |
| AC079612.1 | 2-240500412-CA-TG | cCA/cTG | P/L | Unchanged |
| OR6B2 | 2-240969311-CA-TG | TGt/CAt | C/H | Changed missense |
| PRR21 | 2-240981486-CA-TG | TGc/CAc | C/H | Changed missense |
| PRR21 | 2-240981659-AC-GT | cGT/cAC | R/H | Unchanged |
| PRR21 | 2-240982130-CA-TG | aTG/aCA | M/T | Partially changed missense |
| PRR21 | 2-240982200-CA-TG | TGt/CAt | C/H | Changed missense |
| PRR21 | 2-240982256-CA-TG | aTG/aCA | M/T | Partially changed missense |
| GPC1 | 2-241405478-AC-GT | gAC/gGT | D/G | Unchanged |
| CAPN10 | 2-241531477-CCA-TCG | CcA/TcG | P/S | Unchanged |
| C2orf54 | 2-241828033-CA-TG | cTG/cCA | L/P | Unchanged |
| AC104809.3 | 2-241898823-CA-TG | CAg/TGg | Q/W | Rescued nonsense |
| SDCBP2 | 20-1293008-CA-TG | gTG/gCA | V/A | Unchanged |
| SIRPG | 20-1616205-CA-TG | gTG/gCA | V/A | Unchanged |
| SIRPG | 20-1616206-AC-GT | GTg/ACg | V/T | Changed missense |
| SIRPA | 20-1895819-AC-GT | ACt/GTt | T/V | Changed missense |
| SMOX | 20-4164282-CA-TG | aCA/aTG | T/M | Changed missense |
| BMP2 | 20-6751033-CA-TG | tCA/tTG | S/L | Unchanged |
| PLCB1 | 20-8770822-CTA-TTG | CtA/TtG | L | Unchanged |
| PLCB4 | 20-9404443-AAC-GAT | AaC/GaT | N/D | Unchanged |
| SPTLC3 | 20-13053034-CA-TG | tCA/tTG | S/L | Unchanged |
| KIF16B | 20-16359566-CA-TG | aTG/aCA | M/T | Partially changed missense |
| CST5 | 20-23860177-CA-TG | TGt/CAt | C/H | Changed missense |
| CEP250 | 20-34057798-CA-TG | aCA/aTG | T/M | Changed missense |
| R3HDML | 20-42965862-AC-GT | aAC/aGT | N/S | Unchanged |
| PABPC1L | 20-43566786-CA-TG | tCA/tTG | S/L | Unchanged |
| WFDC3 | 20-44417643-AC-GT | gGT/gAC | G/D | Unchanged |
| FAM65C | 20-49214155-CA-TG | cTG/cCA | L/P | Unchanged |
| PCK1 | 20-56137806-CA-TG | tCA/tTG | S/L | Unchanged |
| PCK1 | 20-56137833-CA-TG | tCA/tTG | S/L | Unchanged |
| C20orf85 | 20-56735759-ATC-GTT | AtC/GtT | I/V | Unchanged |
| LAMA5 | 20-60905877-CA-TG | aTG/aCA | M/T | Partially changed missense |
| OGFR | 20-61444628-CA-TG | cCA/cTG | P/L | Unchanged |
| SLC17A9 | 20-61588158-CA-TG | aCA/aTG | T/M | Changed missense |
| SLC17A9 | 20-61594679-AC-GT | aAC/aGT | N/S | Unchanged |
| TNFRSF6B | 20-62328373-CTA-TTG | CtA/TtG | L | Unchanged |
| POTED | 21-14982634-CA-TG | CAc/TGc | H/C | Changed missense |
| SYNJ1 | 21-34003930-AC-GT | GTt/ACt | V/T | Changed missense |
| SON | 21-34925142-CA-TG | tCA/tTG | S/L | Unchanged |
| SLC5A3 | 21-35467645-AC-GT | ACa/GTa | T/V | Changed missense |
| DOPEY2 | 21-37618179-CA-TG | CAg/TGg | Q/W | Rescued nonsense |
| KCNJ6 | 21-38997497-AC-TG | gGT/gCA | G/A | Unchanged |
| ETS2 | 21-40191637-CA-TG | cCA/cTG | P/L | Unchanged |
| MX1 | 21-42824660-CA-TG | gCA/gTG | A/V | Unchanged |
| PRDM15 | 21-43221481-CGA-TGG | TcG/CcA | S/P | Unchanged |
| RRP1B | 21-45107517-CA-TG | cCA/cTG | P/L | Unchanged |
| PWP2 | 21-45540918-CA-TG | aCA/aTG | T/M | Changed missense |
| PWP2 | 21-45550492-CA-TG | CAc/TGc | H/C | Changed missense |
| TRPM2 | 21-45844750-CA-TG | CAa/TGa | Q/* | Unchanged |
| KRTAP10-6 | 21-46012363-CA-TG | aTG/aCA | M/T | Unchanged |
| KRTAP10-10 | 21-46057551-CCA-TCG | CcA/TcG | P/S | Unchanged |
| KRTAP10-11 | 21-46067217-CA-TG | gCA/gTG | A/V | Unchanged |
| C21orf67 | 21-46355710-AC-GT | cGT/cAC | R/H | Unchanged |
| COL18A1 | 21-46927488-CA-TG | aCA/aTG | T/M | Changed missense |
| COL18A1 | 21-46932256-CA-TG | CAt/TGt | H/C | Changed missense |
| PCNT | 21-47831797-AC-GT | cAC/cGT | H/R | Unchanged |
| PCNT | 21-47841940-CA-TG | CAa/TGa | Q/* | Unchanged |
| PCNT | 21-47851752-CA-TG | CAg/TGg | Q/W | Rescued nonsense |
| PCNT | 21-47855875-CA-TG | aCA/aTG | T/M | Changed missense |
| POTEH | 22-16287337-AGC-GGT | GcT/AcC | A/T | Unchanged |
| BCL2L13 | 22-18209612-CA-TG | tCA/tTG | S/L | Unchanged |
| BCL2L13 | 22-18209716-AAC-GAT | AaC/GaT | N/D | Unchanged |
| TUBA8 | 22-18606977-CA-TG | aCA/aTG | T/M | Changed missense |
| AC008132.13 | 22-18834965-CA-TG | gCA/gTG | A/V | Unchanged |
| PRODH | 22-18912677-CA-TG | TGg/CAg | W/Q | Rescued nonsense |
| TSSK2 | 22-19119750-AC-GT | ACg/GTg | T/V | Changed missense |
| TBX1 | 22-19753960-CA-TG | gCA/gTG | A/V | Unchanged |
| ARVCF | 22-19969105-CA-TG | gTG/gCA | V/A | Unchanged |
| P2RX6 | 22-21377275-AC-GT | ACc/GTc | T/V | Changed missense |
| IGLV4-69 | 22-22385708-AC-TG | tAC/tTG | Y/L | Rescued nonsense |
| IGLV4-69 | 22-22385723-AC-GT | aAC/aGT | N/S | Unchanged |
| IGLV4-69 | 22-22385779-AGC-GGT | AgC/GgT | S/G | Unchanged |
| IGLV9-49 | 22-22698013-AAC-GAT | AaC/GaT | N/D | Unchanged |
| IGLV3-25 | 22-23029532-CA-TG | gCA/gTG | A/V | Unchanged |
| IGLV2-14 | 22-23101669-AC-GT | tAC/tGT | Y/C | Unchanged |
| IGLV3-10 | 22-23154570-CCA-TCG | CcA/TcG | P/S | Unchanged |
| IGLV3-1 | 22-23223438-AGC-TGG | AgC/TgG | S/W | Changed missense |
| RGL4 | 22-24034287-CA-TG | CAg/TGg | Q/W | Rescued nonsense |
| PIWIL3 | 22-25145470-CA-TG | TGt/CAt | C/H | Changed missense |
| C22orf31 | 22-29456698-CA-TG | TGt/CAt | C/H | Changed missense |
| THOC5 | 22-29913271-AC-GT | GTt/ACt | V/T | Changed missense |
| CABP7 | 22-30123750-AC-GT | aAC/aGT | N/S | Unchanged |
| SLC35E4 | 22-31032918-CCA-TCG | CcA/TcG | P/S | Unchanged |
| C22orf42 | 22-32554984-CA-TG | cTG/cCA | L/P | Unchanged |
| RFPL3 | 22-32754230-ACC-GCT | AcC/GcT | T/A | Unchanged |
| CSF2RB | 22-37333793-CA-TG | cCA/cTG | P/L | Unchanged |
| TRIOBP | 22-38122461-CA-TG | CAc/TGc | H/C | Changed missense |
| SLC16A8 | 22-38474695-CA-TG | gTG/gCA | V/A | Unchanged |
| APOBEC3D | 22-39425474-AC-GT | ACa/GTa | T/V | Changed missense |
| MCHR1 | 22-41075694-AC-GT | aAC/aGT | N/S | Unchanged |
| CYP2D6 | 22-42523942-CA-TG | TGc/CAc | C/H | Changed missense |
| TSPO | 22-43558926-AC-GT | ACg/GTg | T/V | Changed missense |
| SCUBE1 | 22-43610106-CGA-TGG | TcG/CcA | S/P | Unchanged |
| PNPLA5 | 22-44282275-CA-TG | TGg/CAg | W/Q | Rescued nonsense |
| PRR5-ARHGAP8 | 22-45198008-CA-TG | cCA/cTG | P/L | Unchanged |
| ARHGAP8 | 22-45198008-CA-TG | cCA/cTG | P/L | Unchanged |
| PRR5-ARHGAP8 | 22-45258456-CA-TG | gCA/gTG | A/V | Unchanged |
| ARHGAP8 | 22-45258456-CA-TG | gCA/gTG | A/V | Unchanged |
| FBLN1 | 22-45923826-CA-TG | CAg/TGg | Q/W | Rescued nonsense |
| PKDREJ | 22-46652998-ATC-GTT | GaT/AaC | D/N | Unchanged |
| PKDREJ | 22-46656241-CA-TG | gTG/gCA | V/A | Unchanged |
| CELSR1 | 22-46929691-CA-TG | TGc/CAc | C/H | Changed missense |
| ZBED4 | 22-50277881-CCA-TCG | CcA/TcG | P/S | Unchanged |
| ZBED4 | 22-50277882-CA-TG | cCA/cTG | P/L | Unchanged |
| ZBED4 | 22-50278437-CA-TG | cCA/cTG | P/L | Unchanged |
| MOV10L1 | 22-50582625-CA-TG | CAg/TGg | Q/W | Rescued nonsense |
| TUBGCP6 | 22-50664611-CA-TG | tTG/tCA | L/S | Unchanged |
| TUBGCP6 | 22-50665476-AGC-GGT | GcT/AcC | A/T | Unchanged |
| KLHDC7B | 22-50988192-CA-TG | CAg/TGg | H/C | Changed missense |
| CHL1 | 3-391100-AC-GT | ACa/GTa | T/V | Changed missense |
| CNTN4 | 3-3076442-CA-TG | cCA/cTG | P/L | Unchanged |
| TRNT1 | 3-3189278-CA-TG | gCA/gTG | A/V | Unchanged |
| LRRN1 | 3-3886579-CA-TG | gCA/gTG | A/V | Unchanged |
| IL17RE | 3-9952705-CA-TG | aCA/aTG | T/M | Changed missense |
| IL17RC | 3-9969880-AC-GT | ACg/GTg | T/V | Changed missense |
| IL17RC | 3-9970030-CA-TG | CAa/TGa | Q/* | Unchanged |
| TATDN2 | 3-10302055-CA-TG | CAt/TGt | H/C | Changed missense |
| RP11-438J1.1 | 3-10302055-CA-TG | CAt/TGt | H/C | Changed missense |
| TATDN2 | 3-10312505-CTA-TTG | CtA/TtG | L | Unchanged |
| RP11-438J1.1 | 3-10312505-CTA-TTG | CtA/TtG | L | Unchanged |
| SLC6A11 | 3-10976875-CA-TG | aCA/aTG | T/M | Changed missense |
| CAND2 | 3-12856855-CA-TG | CAg/TGg | Q/W | Rescued nonsense |
| CAND2 | 3-12858394-CA-TG | CAg/TGg | H/C | Changed missense |
| FBLN2 | 3-13670480-CA-TG | aCA/aTG | T/M | Changed missense |
| FBLN2 | 3-13670536-ACC-GCT | AcC/GcT | T/A | Unchanged |
| TMEM43 | 3-14180704-AGC-GGT | AgC/GgT | S/G | Unchanged |
| RP11-434D12.1 | 3-14180704-AGC-GGT | AgC/GgT | S/G | Unchanged |
| FGD5 | 3-14862947-CA-TG | cCA/cTG | P/L | Unchanged |
| SH3BP5 | 3-15311325-AC-GT | cGT/cAC | R/H | Unchanged |
| KCNH8 | 3-19574944-CA-TG | CAg/TGg | Q/W | Rescued nonsense |
| ZNF860 | 3-32031134-CA-TG | tCA/tTG | S/L | Unchanged |
| GLB1 | 3-33055720-CA-TG | TGc/CAc | C/H | Changed missense |
| PDCD6IP | 3-33907944-CA-TG | cCA/cTG | P/L | Unchanged |
| DLEC1 | 3-38163574-CA-TG | cCA/cTG | P/L | Unchanged |
| ACVR2B | 3-38524741-AC-GT | aAC/aGT | N/S | Unchanged |
| SCN5A | 3-38592406-ATC-GTT | GaT/AaC | D/N | Unchanged |
| CX3CR1 | 3-39307254-AAC-GAT | GtT/AtC | V/I | Unchanged |
| ZBTB47 | 3-42700629-CA-TG | cCA/cTG | P/L | Unchanged |
| FAM198A | 3-43074870-CA-TG | gCA/gTG | A/V | Unchanged |
| FAM198A | 3-43095100-CA-TG | CAg/TGg | Q/W | Rescued nonsense |
| ZNF852 | 3-44540715-CA-TG | aTG/aCA | M/T | Partially changed missense |
| SACM1L | 3-45754684-CA-TG | cCA/cTG | P/L | Unchanged |
| PTPN23 | 3-47453607-AC-TG | aAC/aTG | N/M | Changed missense |
| CCDC71 | 3-49200626-CA-TG | TGg/CAg | W/Q | Rescued nonsense |
| PARP3 | 3-51978219-CA-TG | CAc/TGc | H/C | Changed missense |
| ALAS1 | 3-52237968-ATC-GTT | AtC/GtT | I/V | Unchanged |
| DNAH1 | 3-52430697-CA-TG | CAt/TGt | H/C | Changed missense |
| ITIH1 | 3-52821010-CA-TG | CAg/TGg | Q/W | Rescued nonsense |
| ITIH4 | 3-52864635-AC-GT | cGT/cAC | R/H | Unchanged |
| DCP1A | 3-53326340-AC-GT | GTg/ACg | V/T | Changed missense |
| CCDC66 | 3-56597952-ACC-GCT | AcC/GcT | T/A | Unchanged |
| FLNB | 3-58112439-CA-TG | gCA/gTG | A/V | Unchanged |
| PTPRG | 3-62189526-CA-TG | gCA/gTG | A/V | Unchanged |
| SLC25A26 | 3-66419941-CA-TG | gCA/gTG | A/V | Unchanged |
| FRMD4B | 3-69246150-CAA-TAG | TtG/CtA | L | Unchanged |
| EBLN2 | 3-73111972-CA-TG | cCA/cTG | P/L | Unchanged |
| ZNF717 | 3-75787869-CA-TG | TGc/CAc | C/H | Changed missense |
| ZNF717 | 3-75790879-CA-TG | gTG/gCA | V/A | Unchanged |
| OR5H8P | 3-98031112-CA-TG | gCA/gTG | A/V | Unchanged |
| OR5H8P | 3-98031538-CA-TG | gCA/gTG | A/V | Unchanged |
| GPR15 | 3-98250966-CCA-TCG | CcA/TcG | P/S | Unchanged |
| CEP97 | 3-101476757-CA-TG | gCA/gTG | A/V | Unchanged |
| GUCA1C | 3-108639422-AC-GT | GTt/ACt | V/T | Changed missense |
| WDR52 | 3-113046640-ATC-GTT | GaT/AaC | D/N | Unchanged |
| KIAA2018 | 3-113373929-CA-TG | gTG/gCA | V/A | Unchanged |
| SLC15A2 | 3-121646640-CA-TG | gCA/gTG | A/V | Unchanged |
| PARP15 | 3-122354009-AC-GT | cAC/cGT | H/R | Unchanged |
| HEG1 | 3-124728625-CA-TG | aTG/aCA | M/T | Partially changed missense |
| PLXNA1 | 3-126726704-CA-TG | aCA/aTG | T/M | Changed missense |
| PODXL2 | 3-127379268-ACC-GCT | AcC/GcT | T/A | Unchanged |
| PLXND1 | 3-129281979-AC-GT | aGT/aAC | S/N | Unchanged |
| COL6A5 | 3-130162394-CA-TG | CAa/TGa | Q/* | Unchanged |
| MRPL3 | 3-131188573-CA-TG | aTG/aCA | M/T | Partially changed missense |
| AGTR1 | 3-148459883-CA-TG | cCA/cTG | P/L | Unchanged |
| CPA3 | 3-148597611-AC-GT | ACg/GTg | T/V | Changed missense |
| HPS3 | 3-148863150-CA-TG | aCA/aTG | T/M | Changed missense |
| IGSF10 | 3-151166872-AC-GT | aGT/aAC | S/N | Unchanged |
| MME | 3-154864987-AAC-GAT | AaC/GaT | N/D | Unchanged |
| PLCH1 | 3-155314034-AC-GT | aGT/aAC | S/N | Unchanged |
| RARRES1 | 3-158450169-CCA-GCT | TgG/AgC | W/S | Changed missense |
| PLD1 | 3-171395468-AC-GT | cGT/cAC | R/H | Unchanged |
| KLHL24 | 3-183368890-AC-GT | cAC/cGT | H/R | Unchanged |
| HTR3E | 3-183824369-CA-TG | tCA/tTG | S/L | Unchanged |
| EPHB3 | 3-184289151-CA-TG | aCA/aTG | T/M | Changed missense |
| EHHADH | 3-184910041-CA-TG | tTG/tCA | L/S | Unchanged |
| RTP4 | 3-187088655-AC-GT | ACa/GTa | T/V | Changed missense |
| LPP | 3-188590444-CGA-TGG | CgA/TgG | R/W | Rescued nonsense |
| PYDC2 | 3-191179192-CA-TG | CAa/TGa | Q/* | Unchanged |
| ATP13A4 | 3-193183877-CA-TG | cTG/cCA | L/P | Unchanged |
| CPN2 | 3-194062517-AGC-GGT | GcT/AcC | A/T | Unchanged |
| MUC4 | 3-195505944-CA-TG | gTG/gCA | V/A | Unchanged |
| MUC4 | 3-195506674-AC-GT | GTt/ACt | V/T | Changed missense |
| MUC4 | 3-195507144-CA-TG | gTG/gCA | V/A | Unchanged |
| MUC4 | 3-195507226-AC-GT | GTc/ACc | V/T | Changed missense |
| MUC4 | 3-195507274-AC-GT | GTc/ACc | V/T | Changed missense |
| MUC4 | 3-195509823-ACC-TCG | GgT/CgA | G/R | Unchanged |
| MUC4 | 3-195509832-CA-TG | gTG/gCA | V/A | Unchanged |
| MUC4 | 3-195509976-CA-TG | gTG/gCA | V/A | Unchanged |
| MUC4 | 3-195510024-CA-TG | gTG/gCA | V/A | Unchanged |
| MUC4 | 3-195511138-AC-GT | GTt/ACt | V/T | Changed missense |
| MUC4 | 3-195514401-AGC-GGT | GcT/AcC | A/T | Unchanged |
| MUC4 | 3-195514776-CA-TG | gTG/gCA | V/A | Unchanged |
| UVSSA | 4-1377614-CA-TG | tCA/tTG | S/L | Unchanged |
| CRIPAK | 4-1388582-CA-TG | CAc/TGc | H/C | Changed missense |
| TACC3 | 4-1730298-CA-TG | gCA/gTG | A/V | Unchanged |
| ZFYVE28 | 4-2306051-CGA-TGG | TcG/CcA | S/P | Unchanged |
| RP11-503N18.3 | 4-2461887-CA-TG | CAc/TGc | H/C | Changed missense |
| RP11-503N18.3 | 4-2461888-AC-GT | cAC/cGT | H/R | Unchanged |
| NOP14 | 4-2951803-CA-TG | tTG/tCA | L/S | Unchanged |
| RGS12 | 4-3318412-CA-TG | tCA/tTG | S/L | Unchanged |
| DOK7 | 4-3494599-CA-TG | CAg/TGg | Q/W | Rescued nonsense |
| EVC | 4-5735119-AC-GT | gAC/gGT | D/G | Unchanged |
| WFS1 | 4-6303021-AC-GT | aAC/aGT | N/S | Unchanged |
| WFS1 | 4-6304086-CA-TG | tCA/tTG | S/L | Unchanged |
| PSAPL1 | 4-7435377-CAA-TAG | TtG/CtA | L | Unchanged |
| SH3TC1 | 4-8207082-CA-TG | cCA/cTG | P/L | Unchanged |
| SH3TC1 | 4-8242465-CA-TG | gCA/gTG | A/V | Unchanged |
| CPZ | 4-8602934-CA-TG | tCA/tTG | S/L | Unchanged |
| SLC2A9 | 4-10020693-CA-TG | TGg/CAg | W/Q | Rescued nonsense |
| BST1 | 4-15733403-AC-GT | ACa/GTa | T/V | Changed missense |
| FGFBP2 | 4-15964573-AC-GT | cGT/cAC | R/H | Unchanged |
| FAM184B | 4-17634213-AC-GT | GTc/ACc | V/T | Changed missense |
| SLC34A2 | 4-25678199-AC-GT | gAC/gGT | D/G | Unchanged |
| WDR19 | 4-39207317-CA-TG | tCA/tTG | S/L | Unchanged |
| PDS5A | 4-39921942-AGC-GGT | GcT/AcC | A/T | Unchanged |
| GRXCR1 | 4-42964918-AC-GT | ACt/GTt | T/V | Changed missense |
| SCFD2 | 4-54011525-CA-TG | tTG/tCA | L/S | Unchanged |
| TMEM165 | 4-56262372-CCA-TCG | CcA/TcG | P/S | Unchanged |
| KIAA1211 | 4-57182757-AC-GT | gAC/gGT | D/G | Unchanged |
| REST | 4-57797414-CA-TG | cCA/cTG | P/L | Unchanged |
| NOA1 | 4-57843320-AC-GT | tGT/tAC | C/Y | Unchanged |
| LPHN3 | 4-62845489-CA-TG | cCA/cTG | P/L | Unchanged |
| STAP1 | 4-68442967-CA-TG | aCA/aTG | T/M | Changed missense |
| UGT2B7 | 4-69972951-AC-GT | tAC/tGT | Y/C | Unchanged |
| UGT2B11 | 4-70079974-CA-TG | TGt/CAt | C/H | Changed missense |
| AFP | 4-74318329-CA-TG | aCA/aTG | T/M | Changed missense |
| MTHFD2L | 4-75040281-CA-GT | CAg/GTg | Q/V | Changed missense |
| FRAS1 | 4-79240063-AC-GT | gAC/gGT | D/G | Unchanged |
| FRAS1 | 4-79372929-AC-GT | cAC/cGT | H/R | Unchanged |
| PTPN13 | 4-87671749-CA-TG | tCA/tTG | S/L | Unchanged |
| PTPN13 | 4-87684030-CA-TG | cCA/cTG | P/L | Unchanged |
| DSPP | 4-88535868-AC-GT | aAC/aGT | N/S | Unchanged |
| DSPP | 4-88536437-AAC-GAT | AaC/GaT | N/D | Unchanged |
| DSPP | 4-88536899-AAC-GAT | AaC/GaT | N/D | Unchanged |
| DSPP | 4-88537400-AGC-GGT | AgC/GgT | S/G | Unchanged |
| DSPP | 4-88537418-AGC-GGT | AgC/GgT | S/G | Unchanged |
| DSPP | 4-88537556-AAC-GAT | AaC/GaT | N/D | Unchanged |
| GPRIN3 | 4-90169924-CA-TG | gTG/gCA | V/A | Unchanged |
| GRID2 | 4-94344031-AC-GT | tAC/tGT | Y/C | Unchanged |
| PDLIM5 | 4-95531416-CA-TG | gCA/gTG | A/V | Unchanged |
| UNC5C | 4-96106321-CA-TG | aTG/aCA | M/T | Partially changed missense |
| C4orf17 | 4-100443852-CA-TG | cCA/cTG | P/L | Unchanged |
| BANK1 | 4-102751028-CA-TG | aCA/aTG | T/M | Changed missense |
| BANK1 | 4-102751276-CTA-TTG | CtA/TtG | L | Unchanged |
| ARHGEF38 | 4-106534599-CA-TG | tCA/tTG | S/L | Unchanged |
| SEC24B | 4-110384789-CA-TG | cCA/cTG | P/L | Unchanged |
| EGF | 4-110901146-CA-TG | gCA/gTG | A/V | Unchanged |
| ALPK1 | 4-113350402-CA-TG | aCA/aTG | T/M | Changed missense |
| ALPK1 | 4-113359701-CGA-TGG | CgA/TgG | R/W | Rescued nonsense |
| ANK2 | 4-114277480-CA-TG | gCA/gTG | A/V | Unchanged |
| UGT8 | 4-115544713-CA-TG | cCA/cTG | P/L | Unchanged |
| QRFPR | 4-122250733-CA-TG | tTG/tCA | L/S | Unchanged |
| INTU | 4-128564998-CGA-TGG | CgA/TgG | R/W | Rescued nonsense |
| C4orf33 | 4-130032842-CA-TG | CAt/TGt | H/C | Changed missense |
| DCHS2 | 4-155295075-CA-TG | gTG/gCA | V/A | Unchanged |
| ANXA10 | 4-169098913-CA-TG | aCA/aTG | T/M | Changed missense |
| DDX60L | 4-169341434-CA-TG | TGt/CAt | C/H | Changed missense |
| ADAM29 | 4-175899095-CA-TG | CAg/TGg | Q/W | Rescued nonsense |
| NEIL3 | 4-178256958-AC-TG | gAC/gTG | D/V | Partially changed missense |
| TENM3 | 4-183715018-AC-GT | gAC/gGT | D/G | Unchanged |
| CDKN2AIP | 4-184367724-CA-TG | tCA/tTG | S/L | Unchanged |
| TRAPPC11 | 4-184600600-CA-TG | gCA/gTG | A/V | Unchanged |
| PRIMPOL | 4-185587164-CA-TG | CAg/TGg | Q/W | Rescued nonsense |
| SORBS2 | 4-186541301-AC-GT | cGT/cAC | R/H | Unchanged |
| FAM149A | 4-187078784-CA-TG | CAc/TGc | H/C | Changed missense |
| FAM149A | 4-187078785-AC-GT | cAC/cGT | H/R | Unchanged |
| FAT1 | 4-187629537-AC-GT | GTc/ACc | V/T | Changed missense |
| DUX4L4 | 4-191003179-AC-GT | ACg/GTg | T/V | Changed missense |
| PLEKHG4B | 5-181760-CGA-TGG | CgA/TgG | R/W | Rescued nonsense |
| SLC9A3 | 5-475103-CA-TG | TGc/CAc | C/H | Changed missense |
| SLC6A19 | 5-1216774-CA-TG | aCA/aTG | T/M | Changed missense |
| LPCAT1 | 5-1467003-CA-TG | aTG/aCA | M/T | Partially changed missense |
| SRD5A1 | 5-6651969-CA-TG | cCA/cTG | P/L | Unchanged |
| CDH12 | 5-21752056-ATC-GTT | GaT/AaC | D/N | Unchanged |
| PDZD2 | 5-32058114-CA-TG | tCA/tTG | S/L | Unchanged |
| AMACR | 5-33998882-CA-TG | tTG/tCA | L/S | Unchanged |
| TTC23L | 5-34840840-CA-TG | CAt/TGt | H/C | Changed missense |
| MROH2B | 5-41048532-AC-GT | cGT/cAC | R/H | Unchanged |
| MROH2B | 5-41061715-CA-TG | TGg/CAg | W/Q | Rescued nonsense |
| ZNF131 | 5-43175101-AGC-GGT | AgC/GgT | S/G | Unchanged |
| RP11-45H22.3 | 5-54253580-CA-TG | TGt/CAt | C/H | Changed missense |
| MCCC2 | 5-70945074-CA-TG | gCA/gTG | A/V | Unchanged |
| BTF3 | 5-72798844-CA-TG | aCA/aTG | T/M | Changed missense |
| ARHGEF28 | 5-73144844-CA-TG | tCA/tTG | S/L | Unchanged |
| CMYA5 | 5-79095299-AAC-GAT | AaC/GaT | N/D | Unchanged |
| ANKRD34B | 5-79855371-CA-TG | tTG/tCA | L/S | Unchanged |
| MSH3 | 5-80149980-CA-TG | CAg/TGg | Q/W | Rescued nonsense |
| ATG10 | 5-81549215-AC-GT | ACg/GTg | T/V | Changed missense |
| AC008394.1 | 5-86513973-CA-TG | TGc/CAc | C/H | Changed missense |
| TMEM161B | 5-87493524-AC-GT | GTa/ACa | V/T | Changed missense |
| DCP2 | 5-112328375-CTA-TTG | CtA/TtG | L | Unchanged |
| HSD17B4 | 5-118872183-AC-GT | ACa/GTa | T/V | Changed missense |
| IL13 | 5-131995963-CA-TG | CAg/TGg | Q/W | Rescued nonsense |
| SLC25A48 | 5-135178141-CA-TG | aCA/aTG | T/M | Changed missense |
| APBB3 | 5-139941227-CA-TG | TGc/CAc | C/H | Changed missense |
| PCDHA8 | 5-140222344-CGA-TGG | CgA/TgG | R/W | Rescued nonsense |
| PCDHA9 | 5-140229671-CTA-TTG | CtA/TtG | L | Unchanged |
| PCDHA10 | 5-140237221-CTA-TTG | CtA/TtG | L | Unchanged |
| PCDHA11 | 5-140250423-CTA-TTG | CtA/TiG | L | Unchanged |
| PCDHA12 | 5-140256624-CTA-TTG | CtA/TtG | L | Unchanged |
| PCDHB5 | 5-140516859-AGC-GGT | AgC/GgT | S/G | Unchanged |
| PCDHB10 | 5-140572667-AC-GT | aAC/aGT | N/S | Unchanged |
| PCDHB15 | 5-140627275-CA-TG | gCA/gTG | A/V | Unchanged |
| PCDHGB1 | 5-140731407-CA-TG | aCA/aTG | T/M | Changed missense |
| PCDH12 | 5-141337225-AGC-GGT | GcT/AcC | A/T | Unchanged |
| TCERG1 | 5-145838642-CA-TG | CAg/TGg | Q/W | Rescued nonsense |
| TCOF1 | 5-149755420-CA-TG | tCA/tTG | S/L | Unchanged |
| GM2A | 5-150639409-ATC-GTT | AtC/GtT | l/V | Unchanged |
| FAT2 | 5-150901612-CA-TG | tTG/tCA | L/S | Unchanged |
| MRPL22 | 5-154346258-CA-TG | tCA/tTG | S/L | Unchanged |
| HAVCR1 | 5-156479508-CA-TG | cTG/cCA | L/P | Unchanged |
| ATP10B | 5-16009749S-CA-TG | TGt/CAt | C/H | Changed missense |
| WWC1 | 5-167894863-CA-TG | CAc/TGc | H/C | Changed missense |
| SLIT3 | 5-168098235-ATC-GTT | GaT/AaC | D/N | Unchanged |
| SLIT3 | 5-168212951-AC-GT | GTc/ACc | V/T | Changed missense |
| DOCK2 | 5-169461545-ACC-GCT | AcC/GcT | T/A | Unchanged |
| PRELID1 | 5-176733114-CGA-TGG | CgA/TgG | R/W | Rescued nonsense |
| LMAN2 | 5-176778226-AC-GT | GTa/ACa | V/T | Changed missense |
| FAM153A | 5-177161891-ACC-GCT | GgT/AgC | G/S | Unchanged |
| ZFP2 | 5-178359134-CAA-T AG | CaA/TaG | Q/* | Unchanged |
| CSorf60 | 5-179069467-CA-TG | TGg/CAg | W/Q | Rescued nonsense |
| TBC1D9B | 5-179297352-AC-GT | tGT/tAC | C/Y | Unchanged |
| MGAT1 | 5-180218667-CA-TG | cTG/cCA | L/P | Unchanged |
| BTNL8 | 5-180338368-AC-GT | ACg/GTg | T/V | Changed missense |
| BTNL9 | 5-180472512-CA-TG | cCA/cTG | P/L | Unchanged |
| OR2V2 | 5-180582603-CA-TG | CAc/TGc | H/C | Changed missense |
| NQO2 | 6-3015789-CA-TG | cCA/cTG | P/L | Unchanged |
| RIPK1 | 6-3105857-AC-TG | aAC/aTG | N/M | Changed missense |
| PPP1R3G | 6-5086069-CA-TG | gCA/gTG | A/V | Unchanged |
| RREB1 | 6-7231769-CA-TG | cCA/cTG | P/L | Unchanged |
| DSP | 6-7556048-CA-TG | CAg/TGg | Q/W | Rescued nonsense |
| HIVEP1 | 6-12122174-AC-GT | ACg/GTg | T/V | Changed missense |
| NUP153 | 6-17688691-ATC-GTT | GaT/AaC | D/N | Unchanged |
| LRRC16A | 6-25435757-CA-TG | tCA/tTG | S/L | Unchanged |
| HIST1H2BA | 6-25727263-ATC-GTT | AtC/GtT | I/V | Unchanged |
| HIST1H1A | 6-26017673-CAA-TAG | TtG/CtA | L | Unchanged |
| BTN3A1 | 6-26406394-AAC-GAT | AaC/GaT | N/D | Unchanged |
| OR2J2 | 6-29141771-CA-TG | tCA/tTG | S/L | Unchanged |
| OR2J2 | 6-29142064-ACC-GCT | AcC/GcT | T/A | Unchanged |
| UBD | 6-29523676-CA-GT | TGt/ACt | C/T | Changed missense |
| UBD | 6-29524002-CA-TG | tTG/tCA | L/S | Unchanged |
| MUC21 | 6-30954919-AC-GT | ACc/GTc | T/V | Changed missense |
| MUC21 | 6-30955009-AC-GT | ACc/GTc | T/V | Changed missense |
| MUC22 | 6-30993590-ATC-GTT | AtC/GtT | I/V | Unchanged |
| MUC22 | 6-30993957-CA-TG | gCA/gTG | A/V | Unchanged |
| MUC22 | 6-31002452-AAC-GAT | AaC/GaT | N/D | Unchanged |
| C6orf15 | 6-31079893-CA-TG | gTG/gCA | V/A | Unchanged |
| SLC44A4 | 6-31839308-AC-GT | GTt/ACt | V/T | Changed missense |
| CFB | 6-31914933-CGA-TGG | CgA/TgG | R/W | Rescued nonsense |
| CYP21A2 | 6-32006871-AC-GT | tAC/tGT | Y/C | Unchanged |
| RNF5 | 6-32148029-CCA-TCG | CcA/TcG | P/S | Unchanged |
| HLA-DRA | 6-32410986-CA-TG | aCA/aTG | T/M | Changed missense |
| HLA-DRB5 | 6-32497942-CA-TG | aTG/aCA | M/T | Partially changed missense |
| HLA-DQA1 | 6-32610494-CA-TG | CAa/TGa | Q/* | Unchanged |
| HLA-DQB1 | 6-32632687-ATC-GTT | GaT/AaC | D/N | Unchanged |
| HLA-DQB1 | 6-32632777-CA-TG | gTG/gCA | V/A | Unchanged |
| PSMB9 | 6-32826232-CA-TG | gCA/gTG | A/V | Unchanged |
| HLA-DPA1 | 6-33036950-CA-TG | cTG/cCA | L/P | Unchanged |
| tTPR3 | 6-33636906-AC-GT | cAC/cGT | H/R | Unchanged |
| UHRF1BP1 | 6-34824635-CA-TG | CAg/TGg | Q/W | Rescued nonsense |
| ZNF76 | 6-35260502-AC-GT | cAC/cGT | H/R | Unchanged |
| KtF6 | 6-39325077-CA-TG | TGg/CAg | W/Q | Rescued nonsense |
| FRS3 | 6-41739191-AC-TG | gGT/gCA | G/A | Unchanged |
| C6orf132 | 6-42075068-CA-TG | tTG/tCA | L/S | Unchanged |
| GPR111 | 6-47624298-CA-TG | CAt/TGt | H/C | Changed missense |
| GPR115 | 6-47680256-CA-TG | aCA/aTG | T/M | Changed missense |
| GPR115 | 6-47682671-ATC-GTT | AtC/GtT | I/V | Unchanged |
| FAM83B | 6-54806378-CA-TG | cCA/cTG | P/L | Unchanged |
| C6orf57 | 6-71289188-CA-TG | CAg/TGg | Q/W | Rescued nonsense |
| RtMS1 | 6-72967899-CA-TG | CAt/TGt | H/C | Changed missense |
| DDX43 | 6-74125887-CA-TG | CAg/TGg | Q/W | Rescued nonsense |
| CD109 | 6-74521946-AC-GT | ACg/GTg | T/V | Changed missense |
| FILIP1 | 6-76023772-AC-GT | aGT/aAC | S/N | Unchanged |
| SENP6 | 6-76369052-CGA-TGG | CgA/TgG | R/W | Rescued nonsense |
| IRAK1BP1 | 6-79595096-CA-TG | gCA/gTG | A/V | Unchanged |
| NT5E | 6-86199233-AC-GT | ACg/GTg | T/V | Changed missense |
| COL10A1 | 6-116446575-CA-TG | aTG/aCA | M/T | Partially changed missense |
| TBC1D32 | 6-121625944-CA-TG | tTG/tCA | L/S | Unchanged |
| PTPRK | 6-128403745-AAC-GAT | GtT/AtC | V/I | Unchanged |
| ENPP3 | 6-131995312-CA-TG | cCA/cTG | P/L | Unchanged |
| VNN2 | 6-133072650-AC-GT | gGT/gAC | G/D | Unchanged |
| IL20RA | 6-137325846-AC-GT | GTa/ACa | V/T | Changed missense |
| RP3-422G23.4 | 6-138703761-CA-TG | cCA/cTG | P/L | Unchanged |
| GPR126 | 6-142758630-CA-TG | CAg/TGg | Q/W | Rescued nonsense |
| HIVEP2 | 6-143091262-CA-TG | cTG/cCA | L/P | Unchanged |
| EPM2A | 6-145948739-AC-GT | GTg/ACg | V/T | Changed missense |
| ADGB | 6-147136243-CA-TG | CAc/TGc | H/C | Changed missense |
| SYNE1 | 6-152464839-AC-GT | cGT/cAC | R/H | Unchanged |
| MTRF1L | 6-153323806-AAC-GAT | GtT/AtC | V/I | Unchanged |
| TULR4 | 6-158735085-AGC-GGT | AgC/GgT | S/G | Unchanged |
| SYTL3 | 6-159184461-CA-TG | tCA/tTG | S/L | Unchanged |
| IGF2R | 6-160453977-CA-TG | tCA/tTG | S/L | Unchanged |
| IGF2R | 6-160505207-AC-GT | aAC/aGT | N/S | Unchanged |
| LPA | 6-160969628-CA-TG | aTG/aCA | M/T | Partially changed missense |
| WDR27 | 6-170070722-CA-TG | cTG/cCA | L/P | Unchanged |
| ERMARD | 6-170155480-CGA-TGG | CgA/TgG | R/W | Rescued nonsense |
| FAM120B | 6-170627803-AC-GT | gAC/gGT | D/G | Unchanged |
| FAM120B | 6-170627835-AC-GT | ACa/GTa | T/V | Changed missense |
| FAM120B | 6-170627836-CA-TG | aCA/aTG | T/M | Changed missense |
| AC145676.2 | 7-228658-CA-TG | TGt/CAt | C/H | Changed missense |
| FAM20C | 7-299881-AAC-GAT | AaC/GaT | N/D | Unchanged |
| SUN1 | 7-881668-CA-TG | CAc/TGc | H/C | Changed missense |
| SUN1 | 7-897491-CA-TG | aCA/aTG | T/M | Changed missense |
| GPR146 | 7-1097894-CA-TG | cCA/cTG | P/L | Unchanged |
| MICALL2 | 7-1484572-AC-GT | gGT/gAC | G/D | Unchanged |
| SDK1 | 7-4213974-CA-TG | CAt/TGt | H/C | Changed missense |
| ZNF12 | 7-6731865-CA-TG | aTG/aCA | M/T | Partially changed missense |
| MIOS | 7-7646686-CA-TG | aCA/aTG | T/M | Changed missense |
| DNAH11 | 7-21603885-CA-TG | cCA/cTG | P/L | Unchanged |
| DNAH11 | 7-21628196-CA-TG | CAg/TGg | Q/W | Rescued nonsense |
| DNAH11 | 7-21630981-CA-TG | gCA/gTG | A/V | Unchanged |
| FAM188B | 7-30915260-AAC-GAT | AaC/GaT | N/D | Unchanged |
| AQP1 | 7-30915260-AAC-GAT | AaC/GaT | N/D | Unchanged |
| FAM138B | 7-30915261-AC-GT | aAC/aGT | N/S | Unchanged |
| AQP1 | 7-30915261-AC-GT | aAC/aGT | N/S | Unchanged |
| CCDC129 | 7-31618007-CA-TG | CAt/TGt | H/C | Changed missense |
| AVL9 | 7-32613019-CA-TG | aCA/aTG | T/M | Changed missense |
| AEBP1 | 7-44148552-CA-TG | aCA/aTG | T/M | Changed missense |
| NACAD | 7-45124285-CA-TG | gTG/gCA | V/A | Unchanged |
| ABCA13 | 7-48285165-CAA-TAG | CaA/TaG | Q/* | Unchanged |
| C7orf72 | 7-50173777-ACC-GCT | AcC/GcT | T/A | Unchanged |
| LANCL2 | 7-55459562-CA-TG | aCA/aTG | T/M | Changed missense |
| ZNF479 | 7-57193783-CA-TG | cTG/cCA | L/P | Unchanged |
| GUSB | 7-65425893-CA-TG | cTG/cCA | L/P | Unchanged |
| TYW1 | 7-66648155-AAC-GAT | AaC/GaT | N/D | Unchanged |
| TYW1 | 7-66660241-CA-TG | CAc/TGc | H/C | Changed missense |
| TYW1 | 7-66660242-AC-GT | cAC/cGT | H/R | Unchanged |
| TRIM74 | 7-72436651-CA-TG | TGg/CAg | W/Q | Rescued nonsense |
| TRIM74 | 7-72436665-CA-TG | cTG/cCA | L/P | Unchanged |
| TRIM50 | 7-72738748-CA-TG | TGg/CAg | W/Q | Rescued nonsense |
| TRIM50 | 7-72738762-CA-TG | cTG/cCA | L/P | Unchanged |
| STX1A | 7-73122923-ATC-GTT | GaT/AaC | D/N | Unchanged |
| WBSCR28 | 7-73280018-ACC-GCT | AcC/GcT | T/A | Unchanged |
| TRIM73 | 7-75028468-CA-TG | cCA/cTG | P/L | Unchanged |
| RHBDD2 | 7-75513061-CA-TG | gCA/gTG | A/V | Unchanged |
| DTX2 | 7-76131645-AC-GT | ACa/GTa | T/V | Changed missense |
| DTX2 | 7-76131705-CA-TG | CAc/TGc | H/C | Changed missense |
| DMTF1 | 7-86800350-CA-TG | gCA/gTG | A/V | Unchanged |
| ABCB1 | 7-87179601-ACC-GCT | GgT/AgC | G/S | Unchanged |
| BAIAP2L1 | 7-97933601-CA-TG | tTG/tCA | L/S | Unchanged |
| PVRIG | 7-99817859-AAC-GAT | AaC/GaT | N/D | Unchanged |
| FBXO24 | 7-100198385-AC-GT | ACg/GTg | T/V | Changed missense |
| MUC12 | 7-100634074-AC-GT | cAC/cGT | H/R | Unchanged |
| MUC12 | 7-100636852-CA-TG | aCA/aTG | T/M | Changed missense |
| MUC12 | 7-100638855-CA-TG | CAc/TGc | H/C | Changed missense |
| MUC12 | 7-100646746-CA-TG | aCA/aTG | T/M | Changed missense |
| MUC17 | 7-100677585-CA-TG | tCA/tTG | S/L | Unchanged |
| MUC17 | 7-100677641-AC-GT | ACg/GTg | T/V | Changed missense |
| MUC17 | 7-100682274-CA-TG | cCA/cTG | P/L | Unchanged |
| MUC17 | 7-100684749-CA-TG | cCA/cTG | P/L | Unchanged |
| CUX1 | 7-101844850-CA-TG | cCA/cTG | P/L | Unchanged |
| NAPEPLD | 7-102743891-ATC-GTT | GaT/AaC | D/N | Unchanged |
| PIK3CG | 7-106513009-AGC-GGT | AgC/GgT | S/G | Unchanged |
| GPR85 | 7-112724525-ACC-GCT | GgT/AgC | G/S | Unchanged |
| ST7-OT4 | 7-116596696-CA-TG | CAt/TGt | H/C | Changed missense |
| CCDC136 | 7-128455767-CAA-GAT | CaA/GaT | Q/D | Changed missense |
| CPA5 | 7-129986336-ACC-GCT | AcC/GcT | T/A | Unchanged |
| PLXNA4 | 7-131815310-ATC-GTT | GaT/AaC | D/N | Unchanged |
| PLXNA4 | 7-131883385-AC-TG | GTg/CAg | V/Q | Changed missense |
| AKR1B10 | 7-134221825-CA-TG | aCA/aTG | T/M | Changed missense |
| CREB3L2 | 7-137600689-AC-GT | GTt/ACt | V/T | Changed missense |
| ATP6V0A4 | 7-138417790-CA-TG | aTG/aCA | M/T | Partially changed missense |
| ATP6V0A4 | 7-138455987-CA-TG | gTG/gCA | V/A | Unchanged |
| TRBV6-9 | 7-142104527-CA-TG | gTG/gCA | V/A | Unchanged |
| TRBV7-4 | 7-142176377-CA-TG | TGc/CAc | C/H | Changed missense |
| OR9A2 | 7-142723453-AC-GT | GTg/ACg | V/T | Changed missense |
| CLCN1 | 7-143042836-AC-GT | gAC/gGT | D/G | Unchanged |
| EPHA1 | 7-143097099-CA-TG | gTG/gCA | V/A | Unchanged |
| OR2F1 | 7-143657800-CA-TG | aCA/aTG | T/M | Changed missense |
| OR2A14 | 7-143826695-AGC-TGG | AgC/TgG | S/W | Changed missense |
| KRBA1 | 7-149421772-CA-TG | CAt/TGt | H/C | Changed missense |
| ZNF775 | 7-150094851-AC-GT | ACg/GTg | T/V | Changed missense |
| GIMAP2 | 7-150389856-AC-GT | cAC/cGT | H/R | Unchanged |
| TMEM176A | 7-150501516-ACC-GCT | AcC/GcT | T/A | Unchanged |
| AOC1 | 7-150555914-CA-TG | cCA/cTG | P/L | Unchanged |
| SLC4A2 | 7-150771792-AC-GT | ACt/GTt | T/V | Changed missense |
| DPP6 | 7-154667627-CA-TG | cCA/cTG | P/L | Unchanged |
| AC021218.2 | 7-155755825-CA-TG | tCA/tTG | S/L | Unchanged |
| RNF32 | 7-156469189-CA-TG | gCA/gTG | A/V | Unchanged |
| WDR60 | 7-158672618-CA-TG | CAa/TGa | Q/* | Unchanged |
| ARHGEF10 | 8-1900910-AC-GT | cAC/cGT | H/R | Unchanged |
| TNKS | 8-9564436-CA-TG | aCA/aTG | T/M | Changed missense |
| NEIL2 | 8-11640783-CA-TG | cCA/cTG | P/L | Unchanged |
| KIAA1456 | 8-12878636-CA-TG | CAc/TGc | H/C | Changed missense |
| KIAA1456 | 8-12878828-AGC-GGT | AgC/GgT | S/G | Unchanged |
| DLC1 | 8-12957474-AC-GT | GTg/ACg | V/T | Changed missense |
| MTMR7 | 8-17270787-AC-GT | cGT/cAC | R/H | Unchanged |
| MTUS1 | 8-17612874-CA-TG | TGt/CAt | C/H | Changed missense |
| PCM1 | 8-17796382-AC-GT | aAC/aGT | N/S | Unchanged |
| PDLIM2 | 8-22442660-CA-TG | gCA/gTG | A/V | Unchanged |
| TNFRSF10D | 8-23001987-CA-TG | tTG/tCA | L/S | Unchanged |
| R3HCC1 | 8-23148929-CA-TG | aCA/aTG | T/M | Changed missense |
| R3HCC1 | 8-23152333-CA-TG | aCA/aTG | T/M | Changed missense |
| DOCK5 | 8-25203021-CA-TG | aCA/aTG | T/M | Changed missense |
| DOCK5 | 8-25267621-CA-TG | cCA/cTG | P/L | Unchanged |
| ADRA1A | 8-26628027-CA-TG | TGc/CAc | C/H | Changed missense |
| MAK16 | 8-33356073-CA-TG | CAg/TGg | Q/W | Rescued nonsense |
| PROSC | 8-37623819-ATC-GTT | AtC/GtT | I/V | Unchanged |
| DDHD2 | 8-38095661-AC-GT | ACg/GTg | T/V | Changed missense |
| PREX2 | 8-69143588-CA-TG | cCA/cTG | P/L | Unchanged |
| SBSPON | 8-73982160-CA-TG | TGg/CAg | W/Q | Rescued nonsense |
| ZFHX4 | 8-77765864-AC-GT | tAC/tGT | Y/C | Unchanged |
| PEX2 | 8-77895864-CA-TG | TGt/CAt | C/H | Changed missense |
| RSPO2 | 8-108970366-CA-TG | cTG/cCA | L/P | Unchanged |
| PKHD1L1 | 8-110416812-AC-GT | tAC/tGT | Y/C | Unchanged |
| PKHD1L1 | 8-110437383-CA-TG | CAt/TGt | H/C | Changed missense |
| TBC1D31 | 8-124121797-CA-TG | gCA/gTG | A/V | Unchanged |
| HHLA1 | 8-133089974-CA-TG | tTG/tCA | L/S | Unchanged |
| ZFAT | 8-135612745-ATC-GTT | GaT/AaC | D/N | Unchanged |
| ZFAT | 8-135614705-AC-GT | cGT/cAC | R/H | Unchanged |
| SLC45A4 | 8-142222374-ACC-GCT | GgT/AgC | G/S | Unchanged |
| CYP11B2 | 8-143994265-CA-TG | gTG/gCA | V/A | Unchanged |
| MROH6 | 8-144649550-AC-GT | cGT/cAC | R/H | Unchanged |
| MROH6 | 8-144654254-CA-TG | gTG/gCA | V/A | Unchanged |
| EEF1D | 8-144671223-AGC-GGT | GcT/AcC | A/T | Unchanged |
| FAM83H | 8-144808955-AC-TG | aGT/aCA | S/T | Partially changed missense |
| PLEC | 8-144990528-AGC-GGT | GcT/AcC | A/T | Unchanged |
| PLEC | 8-145011204-AGC-GGT | GcT/AcC | A/T | Unchanged |
| PARP10 | 8-145057867-CA-TG | gTG/gCA | V/A | Unchanged |
| SLC39A4 | 8-145640410-CA-TG | TGg/CAg | W/Q | Rescued nonsense |
| KIFC2 | 8-145693719-CA-TG | gCA/gTG | A/V | Unchanged |
| KCNV2 | 9-2718497-CA-TG | cCA/cTG | P/L | Unchanged |
| GLIS3 | 9-4118206-CGA-TGG | TcG/CcA | S/P | Unchanged |
| JAK2 | 9-5050705-AC-GT | cAC/cGT | H/R | Unchanged |
| ADAMTSL1 | 9-18681820-CA-TG | aCA/aTG | T/M | Changed missense |
| TEK | 9-27202869-CA-TG | tCA/tTG | S/L | Unchanged |
| RECK | 9-36105263-CA-TG | cCA/cTG | P/L | Unchanged |
| GRHPR | 9-37429813-CA-TG | gCA/gTG | A/V | Unchanged |
| SPATA31A3 | 9-40702845-AC-GT | ACc/GTc | T/V | Changed missense |
| OSTF1 | 9-77752508-ATC-GTT | AtC/GtT | I/V | Unchanged |
| PRUNE2 | 9-79322673-CA-TG | TGt/CAt | C/H | Changed missense |
| SPATA31D1 | 9-84607216-AAC-GAT | AaC/GaT | N/D | Unchanged |
| OMD | 9-95179178-AC-GT | aGT/aAC | S/N | Unchanged |
| FGD3 | 9-95780464-CA-TG | aCA/aTG | T/M | Changed missense |
| C9orf156 | 9-100684755-CGA-TGG | TcG/CcA | S/P | Unchanged |
| TBC1D2 | 9-100972949-CA-TG | cTG/cCA | L/P | Unchanged |
| TBC1D2 | 9-100995720-CA-TG | tTG/tCA | L/S | Unchanged |
| INVS | 9-103015206-CTA-TTG | CtA/TtG | L | Unchanged |
| ZNF189 | 9-104162227-AC-GT | gAC/gGT | D/G | Unchanged |
| OR13C5 | 9-107360825-CA-TG | aTG/aCA | M/T | Partially changed missense |
| RAD23B | 9-110084388-CA-GT | aCA/aGT | T/S | Changed missense |
| PALM2-AKAP2 | 9-112900784-CA-TG | tCA/tTG | S/L | Unchanged |
| AKAP2 | 9-112900784-CA-TG | tCA/tTG | S/L | Unchanged |
| RGS3 | 9-116346286-AC-GT | tAC/tGT | Y/C | Unchanged |
| DFNB31 | 9-117166245-CA-TG | gTG/gCA | V/A | Unchanged |
| DFNB31 | 9-117169032-CA-TG | aTG/aCA | M/T | Partially changed missense |
| DFNB31 | 9-117186677-AC-GT | gGT/gAC | G/D | Unchanged |
| OR1Q1 | 9-125377086-CA-TG | CAa/TGa | Q/* | Unchanged |
| OR1B1 | 9-125391407-CAA-T AG | TtG/CtA | L | Unchanged |
| WDR38 | 9-127618775-CA-TG | CAc/TGc | H/C | Changed missense |
| RABEPK | 9-127996045-CA-TG | cCA/cTG | P/L | Unchanged |
| ZNF79 | 9-130191186-CA-TG | aCA/aTG | T/M | Changed missense |
| LRSAM1 | 9-130242166-AAC-GAT | AaC/GaT | N/D | Unchanged |
| AL359091.2 | 9-131063361-CA-TG | CAt/TGt | H/C | Changed missense |
| ODF2 | 9-131235320-CA-TG | aCA/aTG | T/M | Changed missense |
| SPTAN1 | 9-131375699-CTA-TTG | CtA/TtG | L | Unchanged |
| ASS1 | 9-133346225-AC-GT | cAC/cGT | H/R | Unchanged |
| LAMC3 | 9-133911597-CA-TG | gCA/gTG | A/V | Unchanged |
| NTNG2 | 9-135105964-AC-GT | ACt/GTt | T/V | Changed missense |
| DBH | 9-136518096-CA-TG | aCA/aTG | T/M | Changed missense |
| AL390778.1 | 9-138150587-CA-TG | cTG/cCA | L/P | Unchanged |
| AL390778.1 | 9-138151156-CA-TG | tTG/tCA | L/S | Unchanged |
| PPP1R26 | 9-138378856-AAC-GAT | AaC/GaT | N/D | Unchanged |
| SEC16A | 9-139369062-CA-TG | tTG/tCA | L/S | Unchanged |
| C8G | 9-139840543-AC-GT | gAC/gGT | D/G | Unchanged |
| C9orf141 | 9-139864340-CA-TG | CAg/TGg | Q/W | Rescued nonsense |
| ENTPD8 | 9-140332477-CA-TG | cTG/cCA | L/P | Unchanged |
| PNPLA7 | 9-140357971-CA-TG | TGg/CAg | W/Q | Rescued nonsense |
| PNPLA7 | 9-140396120-CA-TG | gTG/gCA | V/A | Unchanged |
| EHMT1 | 9-140611120-CA-GT | gCA/gGT | A/G | Unchanged |
| ASMTL | X-1546876-AC-GT | cGT/cAC | R/H | Unchanged |
| GYG2 | X-2779569-CA-TG | CAc/TGc | H/C | Changed missense |
| GYG2 | X-2779570-AC-GT | cAC/cGT | H/R | Unchanged |
| MXRA5 | X-3241284-AC-GT | aGT/aAC | S/N | Unchanged |
| PRKX | X-3631166-CA-TG | gTG/gCA | V/A | Unchanged |
| VCX2 | X-8138181-CA-TG | cTG/cCA | L/P | Unchanged |
| SHROOM2 | X-9859097-CA-TG | cCA/cTG | P/L | Unchanged |
| MAGEB16 | X-35820794-CA-TG | CAc/TGc | H/C | Changed missense |
| ZNF157 | X-47272530-CA-TG | aCA/aTG | T/M | Changed missense |
| XAGE5 | X-52842212-CA-TG | CAg/TGg | Q/W | Rescued nonsense |
| TSPYL2 | X-53115057-AAC-GAT | AaC/GaT | N/D | Unchanged |
| MAGED2 | X-54836360-CA-TG | tCA/tTG | S/L | Unchanged |
| HEPH | X-65427123-CA-TG | aCA/aTG | T/M | Changed missense |
| KIF4A | X-69516919-AC-TG | ACt/TGt | T/C | Changed missense |
| FAM46D | X-79698592-AC-TG | gAC/gTG | D/V | Partially changed missense |
| RBMXL3 | X-114425236-AC-GT | tAC/tGT | Y/C | Unchanged |
| LONRF3 | X-118148228-CA-TG | gCA/gTG | A/V | Unchanged |
| CT47B1 | X-120007783-CA-TG | gTG/gCA | V/A | Unchanged |
| CCDC160 | X-133379551-CTA-TTG | CtA/TtG | L | Unchanged |
| SPANXD | X-140785829-CGA-TGG | TcG/CcA | S/P | Unchanged |
| SPANXN3 | X-142596981-AC-GT | GTa/ACa | V/T | Changed missense |
| MAGEA8 | X-149013726-CA-TG | gCA/gTG | A/V | Unchanged |
| MAGEA4 | X-151092219-CA-TG | gCA/gTG | A/V | Unchanged |
| CSAG1 | X-151908844-AC-TG | tAC/tTG | Y/L | Rescued nonsense |
| ATP6AP1 | X-153657081-CGA-TGG | CgA/TgG | R/W | Rescued nonsense |
| PLXNA3 | X-153694819-CA-TG | aCA/aTG | T/M | Changed missense |

TABLE I
Specific targetable MNV mutations from the gnomAD database that can
be created with SPACE using Cas9 proteins with NGG PAM recognition.

| Gene_name | MNV | MNV_codons | MNV_AAs | MNV_category |
|---|---|---|---|---|
| SAMD11 | 1-877831-TG-CA | TGg/CAg | W/Q | Rescued nonsense |
| NOC2L | 1-888657-GAT-AAC | AtC/GtT | I/V | Unchanged |
| C1orf170 | 1-914940-TG-CA | gCA/gTG | A/V | Unchanged |
| CPSF3L | 1-1247494-TG-CA | cCA/cTG | P/L | Unchanged |
| TAS1R3 | 1-1269554-TG-CA | TGc/CAc | C/H | Changed missense |
| DVL1 | 1-1277533-TG-CA | cCA/cTG | P/L | Unchanged |
| MIB2 | 1-1558792-TG-CA | aTG/aCA | M/T | Partially changed missense |
| PEX10 | 1-2340200-TG-CA | aCA/aTG | T/M | Changed missense |
| PERS | 1-7870047-GT-AC | aGT/aAC | S/N | Unchanged |
| GPR157 | 1-9171348-TG-AC | CAc/GTc | H/V | Changed missense |
| C1orf127 | 1-11008695-TG-CA | cCA/cTG | P/L | Unchanged |
| C1orf167 | 1-11836628-TG-CA | TGg/CAg | W/Q | Rescued nonsense |
| C1orf167 | 1-11839998-TG-CA | TGg/CAg | W/Q | Rescued nonsense |
| TNFRSF1B | 1-12252927-GT-AC | GTg/ACg | V/T | Changed missense |
| DHRS3 | 1-12638964-TG-CA | cCA/cTG | P/L | Unchanged |
| AADACL3 | 1-12779558-GAT-AAC | GaT/AaC | D/N | Unchanged |
| PRAMEF10 | 1-12954806-TG-CA | aCA/aTG | T/M | Changed missense |
| PRAMEF26 | 1-13219066-TG-CA | CAc/TGc | H/C | Changed missense |
| PRAMEF13 | 1-13448351-TG-CA | CAc/TGc | H/C | Changed missense |
| CLCNKB | 1-16380196-TG-CA | aTG/aCA | M/T | Partially changed missense |
| PADI4 | 1-17657616-TG-CA | gTG/gCA | V/A | Unchanged |
| TAS1R2 | 1-19181391-GAT-AAC | AtC/GtT | I/V | Unchanged |
| VWA5B1 | 1-20644156-TG-CA | TGt/CAt | C/H | Changed missense |
| HSPG2 | 1-22149935-TG-CA | tCA/tTG | S/L | Unchanged |
| SFN | 1-27189854-GT-CA | GTg/CAg | V/Q | Changed missense |
| C1orf172 | 1-27278573-TG-CA | CAg/TGg | Q/W | Rescued nonsense |
| MAP3K6 | 1-27684006-TG-CA | CAc/TGc | H/C | Changed missense |
| WASF2 | 1-27736478-TG-CA | cCA/cTG | P/L | Unchanged |
| THEMIS2 | 1-28209360-GTT-ATC | GtT/AtC | V/I | Unchanged |
| ZFP69B | 1-40923018-TG-CA | TGt/CAt | C/H | Changed missense |
| HIVEP3 | 1-42048745-TG-CA | CAc/TGc | H/C | Changed missense |
| PTPRF | 1-44071220-TG-CA | gTG/gCA | V/A | Unchanged |
| STIL | 1-47726087-TG-CA | CAt/TGt | H/C | Changed missense |
| SLC1A7 | 1-53553754-TG-CA | CAg/TGg | Q/W | Rescued nonsense |
| CACHD1 | 1-65113568-TG-CA | aTG/aCA | M/T | Partially changed missense |
| TGFBR3 | 1-92262874-TG-CA | gCA/gTG | A/V | Unchanged |
| RWDD3 | 1-95709821-TG-CA | gTG/gCA | V/A | Unchanged |
| GSTM5 | 1-110256333-GT-AC | GTt/ACt | V/T | Changed missense |
| GSTM5 | 1-110256333-GTT-ATC | GtT/AtC | V/I | Unchanged |
| EPS8L3 | 1-110295772-TG-CA | tCA/tTG | S/L | Unchanged |
| IGSF3 | 1-117156584-TG-CA | CAg/TGg | Q/W | Rescued nonsense |
| NBPF14 | 1-148004782-GCT-ACC | AgC/GgT | S/G | Unchanged |
| HRNR | 1-152191750-TG-CA | tCA/tTG | S/L | Unchanged |
| FLG | 1-152275725-TCG-CCA | CgA/TgG | R/W | Rescued nonsense |
| FLG | 1-152276827-TG-CA | CAg/TGg | Q/W | Rescued nonsense |
| FLG | 1-152285413-TG-CA | CAg/TGg | Q/W | Rescued nonsense |
| FLG | 1-152285512-TG-CA | CAg/TGg | Q/W | Rescued nonsense |
| IVL | 1-152882851-TG-CA | cTG/cCA | L/P | Unchanged |
| SPRR2D | 1-153012764-GT-AC | ACg/GTg | T/V | Changed missense |
| LOR | 1-153233519-GGT-AGC | GgT/AgC | G/S | Unchanged |
| RXFP4 | 1-155912486-TG-CA | tTG/tCA | L/S | Unchanged |
| MEF2D | 1-156450740-GT-AC | aAC/aGT | N/S | Unchanged |
| IQGAP3 | 1-156532977-TTG-CTA | CaA/TaG | Q/* | Unchanged |
| OR6N1 | 1-158735691-TG-CA | CAg/TGg | Q/W | Rescued nonsense |
| C1orf204 | 1-159824966-TG-AC | CAa/GTa | Q/V | Changed missense |
| DCAF6 | 1-168013850-TG-CA | gTG/gCA | V/A | Unchanged |
| SELP | 1-169566308-GT-AC | aAC/aGT | N/S | Unchanged |
| TNN | 1-175086123-TG-CA | aTG/aCA | M/T | Partially changed missense |
| SEC16B | 1-177929987-TG-CA | CAt/TGt | H/C | Changed missense |
| LAMC1 | 1-183105533-GT-AC | cGT/cAC | R/H | Unchanged |
| RNPEP | 1-201970560-GTT-ATC | GtT/AtC | V/I | Unchanged |
| PLXNA2 | 1-208207839-GT-AC | tAC/tGT | Y/C | Unchanged |
| OR2T33 | 1-248436965-TG-CA | CAc/TGc | H/C | Changed missense |
| OR2T12 | 1-248458729-TG-CA | CAc/TGc | H/C | Changed missense |
| OR2T29 | 1-248722722-TG-CA | CAa/TGa | Q/* | Unchanged |
| OR2T27 | 1-248813292-TG-CA | aCA/aTG | T/M | Changed missense |
| PITRM1 | 10-3180227-TG-CA | CAa/TGa | Q/* | Unchanged |
| ECHDC3 | 10-11797434-GTT-ATC | GtT/AtC | V/I | Unchanged |
| CUBN | 10-16882518-TG-CA | aCA/aTG | T/M | Changed missense |
| C10ORF68 | 10-33137551-TG-CA | aTG/aCA | M/T | Partially changed missense |
| GPRIN2 | 10-47000004-TG-CA | gTG/gCA | V/A | Unchanged |
| FRMPD2 | 10-49380999-TG-CA | tCA/tTG | S/L | Unchanged |
| WDFY4 | 10-50109902-GT-AC | aGT/aAC | S/N | Unchanged |
| LRRC18 | 10-50121784-TG-CA | aCA/aTG | T/M | Changed missense |
| CHAT | 10-50856652-GT-AC | GTg/ACg | V/T | Changed missense |
| PCDH15 | 10-55996608-TG-CA | cCA/cTG | P/L | Unchanged |
| HKDC1 | 10-71018660-TG-CA | TGg/CAg | W/Q | Rescued nonsense |
| HKDC1 | 10-71018660-TGG-CGA | TgG/CgA | W/R | Rescued nonsense |
| PLAU | 10-75673101-TG-CA | cTG/cCA | L/P | Unchanged |
| KAT6B | 10-76789077-GT-AC | GTa/ACa | V/T | Changed missense |
| DLG5 | 10-79616605-TG-CA | CAg/TGg | Q/W | Rescued nonsense |
| NUTM2B | 10-81471741-TG-CA | TGg/CAg | W/Q | Rescued nonsense |
| LRIT1 | 10-85992511-TG-CA | cCA/cTG | P/L | Unchanged |
| CEP55 | 10-95276718-TG-CA | TGt/CAt | C/H | Changed missense |
| SORBS1 | 10-97174351-GT-AC | ACg/GTg | T/V | Changed missense |
| DNMBP | 10-101645498-TG-CA | cCA/cTG | P/L | Unchanged |
| CALHM1 | 10-105218359-TG-CA | gCA/gTG | A/V | Unchanged |
| NHLRC2 | 10-115636469-TG-CA | aTG/aCA | M/T | Partiaiiy changed missense |
| BAG3 | 10-121429633-TG-CA | TGt/CAt | C/H | Changed missense |
| PLEKHA1 | 10-124183731-GT-AC | cGT/cAC | R/H | Unchanged |
| DMBT1 | 10-124345741-TG-CA | tTG/tCA | L/S | Unchanged |
| C10orf90 | 10-128202435-TG-CA | gCA/gTG | A/V | Unchanged |
| GPR123 | 10-134910553-GT-CA | GTc/CAc | V/H | Changed missense |
| MUC2 | 11-1081074-TG-CA | gTG/gCA | V/A | Unchanged |
| MUC2 | 11-1083291-GAT-AAC | GaT/AaC | D/N | Unchanged |
| MUC5B | 11-1265936-TG-CA | cTG/cCA | L/P | Unchanged |
| KRTAP5-5 | 11-1651161-TG-CA | TGt/CAt | C/H | Changed missense |
| SYT8 | 11-1857173-TG-CA | TGc/CAc | C/H | Changed missense |
| SYT8 | 11-1857746-GT-AC | cGT/cAC | R/H | Unchanged |
| OR56A3 | 11-5968728-TG-CA | aTG/aCA | M/T | Partiaiiy changed missense |
| OR56A1 | 11-6048515-TG-CA | cCA/cTG | P/L | Unchanged |
| DNHD1 | 11-6569896-GT-AC | GTg/ACg | V/T | Changed missense |
| DCHS1 | 11-6655433-GT-AC | cAC/cGT | H/R | Unchanged |
| OR2AG2 | 11-6789862-GCT-ACC | AgC/GgT | S/G | Unchanged |
| OVCH2 | 11-7712523-GT-AC | ACa/GTa | T/V | Changed missense |
| TRIM66 | 11-8662090-TG-CA | CAt/TGt | H/C | Changed missense |
| TRIM66 | 11-8662516-TG-CA | CAc/TGc | H/C | Changed missense |
| MRGPRX3 | 11-18159455-TG-CA | TGg/CAg | W/Q | Rescued nonsense |
| MRGPRX3 | 11-18159668-TG-CA | TGg/CAg | W/Q | Rescued nonsense |
| MRGPRX4 | 11-18195173-GTT-ATC | GtT/AtC | V/I | Unchanged |
| RP11-113D6.6 | 11-18210480-TG-CA | cCA/cTG | P/L | Unchanged |
| MRGPRX1 | 11-18956305-GT-AC | gAC/gGT | D/G | Unchanged |
| ALX4 | 11-44297Q54-TG-CA | tCA/tTG | S/L | Unchanged |
| GR10Q1 | 11-57996084-GT-AC | aAC/aGT | N/S | Unchanged |
| RAB3IL1 | 11-61672235-TG-CA | aCA/aTG | T/M | Changed missense |
| ASRGL1 | 11-62105546-GT-CA | GTg/CAg | V/Q | Changed missense |
| CCDC88B | 11-64111928-TG-CA | TGg/CAg | W/Q | Rescued nonsense |
| CCDC88B | 11-64111928-TGG-CGA | TgG/CgA | W/R | Rescued nonsense |
| EFEMP2 | 11-65635801-GTT-ATC | AaC/GaT | N/D | Unchanged |
| C11orf68 | 11-65685225-TG-CA | CAg/TGg | Q/W | Rescued nonsense |
| RHOD | 11-66837965-TG-CA | TGc/CAc | C/H | Changed missense |
| RAD9A | 11-67164789-GGT-AGC | GgT/AgC | G/S | Unchanged |
| MYEOV | 11-69063393-TG-CA | gTG/gCA | V/A | Unchanged |
| KRTAP5-10 | 11-71276715-TG-CA | TGt/CAt | C/H | Changed missense |
| KRTAP5-10 | 11-71276946-GGT-AGC | GgT/AgC | G/S | Unchanged |
| FAM86C1 | 11-71504475-TG-CA | gTG/gCA | V/A | Unchanged |
| ARAP1 | 11-72415329-GT-AC | aAC/aGT | N/S | Unchanged |
| LRRC32 | 11-76372418-TG-CA | aCA/aTG | T/M | Changed missense |
| TMPRSS5 | 11-113570405-TG-CA | gCA/gTG | A/V | Unchanged |
| HYOU1 | 11-118925341-GT-AC | aAC/aGT | N/S | Unchanged |
| MCAM | 11-119181170-TAG-CAA | CtA/TtG | L | Unchanged |
| OR10G7 | 11-123909181-GT-AC | tAC/tGT | Y/C | Unchanged |
| OR10G7 | 11-123909194-TG-CA | CAg/TGg | Q/W | Rescued nonsense |
| HYLS1 | 11-125769354-TG-CA | TGt/CAt | C/H | Changed missense |
| RPUSD4 | 11-126081403-TG-CA | CAg/TGg | Q/W | Rescued nonsense |
| NFRKB | 11-129754668-TG-CA | aCA/aTG | T/M | Changed missense |
| IQSEC3 | 12-284056-GGT-AGC | GgT/AgC | G/S | Unchanged |
| AKAP3 | 12-4737042-GT-AC | cAC/cGT | H/R | Unchanged |
| KCNA5 | 12-5154461-GT-AC | gGT/gAC | G/D | Unchanged |
| VWF | 12-6094784-TG-CA | aCA/aTG | T/M | Changed missense |
| VWF | 12-6128441-GGT-AGC | AcC/GcT | T/A | Unchanged |
| NCAPD2 | 12-6632471-GT-AC | GTg/ACg | V/T | Changed missense |
| KLRC1 | 12-10603669-GT-AC | aAC/aGT | N/S | Unchanged |
| WBP11 | 12-14947554-TG-CA | CAg/TGg | Q/W | Rescued nonsense |
| RERG | 12-15262179-GT-AC | aAC/aGT | N/S | Unchanged |
| ITPR2 | 12-26809316-GT-AC | cAC/cGT | H/R | Unchanged |
| TSPAN11 | 12-31135579-TG-CA | gTG/gCA | V/A | Unchanged |
| LRRK2 | 12-40758652-TG-CA | aTG/aCA | M/T | Partially changed missense |
| MUC19 | 12-40821867-GT-AC | GTc/ACc | V/T | Changed missense |
| OR8S1 | 12-48919793-TG-CA | TGc/CAc | C/H | Changed missense |
| KRT83 | 12-52708419-TG-CA | CAt/TGt | H/C | Changed missense |
| KRT4 | 12-53205757-TG-CA | CAg/TGg | Q/W | Rescued nonsense |
| ESPL1 | 12-53686703-GT-AC | cGT/cAC | R/H | Unchanged |
| SPRYD4 | 12-56862886-TG-CA | aTG/aCA | M/T | Partially changed missense |
| HAL | 12-96384249-TG-CA | cCA/cTG | P/L | Unchanged |
| ANKS1B | 12-99640557-TG-CA | cCA/cTG | P/L | Unchanged |
| GNPTAB | 12-102158763-TG-CA | aCA/aTG | T/M | Changed missense |
| APPL2 | 12-105568176-GT-AC | gAC/gGT | D/G | Unchanged |
| RAB35 | 12-120535169-GT-AC | aAC/aGT | N/S | Unchanged |
| KDM2B | 12-121880520-GT-AC | gAC/gGT | D/G | Unchanged |
| HPD | 12-122295334-GT-AC | ACg/GTg | T/V | Changed missense |
| DDX51 | 12-132626668-TG-CA | CAg/TGg | Q/W | Rescued nonsense |
| GOLGA3 | 12-133389998-TG-CA | aCA/aTG | T/M | Changed missense |
| MIPEP | 13-24411770-GCT-ACC | AgC/GgT | S/G | Unchanged |
| SHISA2 | 13-26620924-GT-AC | aAC/aGT | N/S | Unchanged |
| COG3 | 13-46108853-TG-CA | tTG/tCA | L/S | Unchanged |
| DOCK9 | 13-99452659-GAT-CAA | AtC/TtG | I/L | Changed missense |
| TMTC4 | 13-101287365-TG-CA | gCA/gTG | A/V | Unchanged |
| ARHGEF7 | 13-111870035-GAT-AAC | GaT/AaC | D/N | Unchanged |
| ATP4B | 13-114309226-GT-AC | tAC/tGT | Y/C | Unchanged |
| TMEM255B | 13-114469204-GT-AC | GTt/ACt | V/T | Changed missense |
| OR11H6 | 14-20692643-TG-CA | TGt/CAt | C/H | Changed missense |
| OR4E2 | 14-22133648-GT-AC | GTg/ACg | V/T | Changed missense |
| RABGGTA | 14-24736960-GT-AC | ACg/GTg | T/V | Changed missense |
| SDR39U1 | 14-24909362-TG-CA | CAg/TGg | Q/W | Rescued nonsense |
| CTAGE5 | 14-39736679-GT-AC | GTt/ACt | V/T | Changed missense |
| FBXO34 | 14-55818706-TG-CA | cTG/cCA | L/P | Unchanged |
| ADAM21 | 14-70925520-TG-CA | cTG/cCA | L/P | Unchanged |
| C14orf166B | 14-77332408-TG-CA | gTG/gCA | V/A | Unchanged |
| NGB | 14-77735616-TG-CA | CAg/TGg | Q/W | Rescued nonsense |
| SYNE3 | 14-95912426-TG-CA | gCA/gTG | A/V | Unchanged |
| SYNE3 | 14-95918625-TG-CA | cCA/cTG | P/L | Unchanged |
| AHNAK2 | 14-105413979-TG-CA | aCA/aTG | T/M | Changed missense |
| AHNAK2 | 14-105414132-TG-CA | cCA/cTG | P/L | Unchanged |
| AHNAK2 | 14-105414312-TG-CA | tCA/tTG | S/L | Unchanged |
| AHNAK2 | 14-105415353-GT-AC | gAC/gGT | D/G | Unchanged |
| AHNAK2 | 14-105415482-GT-AC | gAC/gGT | D/G | Unchanged |
| AHNAK2 | 14-105415959-TG-CA | aCA/aTG | T/M | Changed missense |
| AHNAK2 | 14-105416010-TG-CA | aCA/aTG | T/M | Changed missense |
| AHNAK2 | 14-105416619-GTT-ATC | AaC/GaT | N/D | Unchanged |
| AHNAK2 | 14-105416787-TG-CA | tCA/tTG | S/L | Unchanged |
| AHNAK2 | 14-105416790-TG-CA | cCA/cTG | P/L | Unchanged |
| AHNAK2 | 14-105416949-TG-CA | aCA/aTG | T/M | Changed missense |
| AHNAK2 | 14-105417102-TG-CA | cCA/cTG | P/L | Unchanged |
| AHNAK2 | 14-105417444-TG-CA | aCA/aTG | T/M | Changed missense |
| AHNAK2 | 14-105417597-TG-CA | cCA/cTG | P/L | Unchanged |
| AHNAK2 | 14-105417862-TG-CA | CAg/TGg | Q/W | Rescued nonsense |
| AHNAK2 | 14-105418275-TG-CA | cCA/cTG | P/L | Unchanged |
| AHNAK2 | 14-105419424-TG-CA | aCA/aTG | T/M | Changed missense |
| AHNAK2 | 14-105419739-TG-CA | cCA/cTG | P/L | Unchanged |
| IGHE | 14-106066454-TG-CA | gCA/gTG | A/V | Unchanged |
| IGHJ5 | 14-106330035-GT-AC | ACc/GTc | T/V | Changed missense |
| IGHV1-2 | 14-106452734-GCT-ACC | AgC/GgT | S/G | Unchanged |
| IGHV1-24 | 14-106733264-TG-CA | aCA/aTG | T/M | Changed missense |
| IGHV2-26 | 14-106758084-TG-CA | aCA/aTG | T/M | Changed missense |
| IGHV4-39 | 14-106877682-GT-AC | aAC/aGT | N/S | Unchanged |
| IGHV2-70 | 14-107178886-GT-AC | aAC/aGT | N/S | Unchanged |
| GOLGA6L1 | 15-22742549-TG-CA | TGg/CAg | W/Q | Rescued nonsense |
| NIPA1 | 15-23052632-TG-CA | aCA/aTG | T/M | Changed missense |
| GABRA5 | 15-27182355-GTT-ATC | GtT/AtC | V/I | Unchanged |
| HERC2 | 15-28414665-TG-CA | tCA/tTG | S/L | Unchanged |
| GOLGA8M | 15-28949058-GT-AC | cAC/cGT | H/R | Unchanged |
| APBA2 | 15-29347019-TG-CA | cTG/cCA | L/P | Unchanged |
| GOLGA8O | 15-32739268-GT-AC | cAC/cGT | H/R | Unchanged |
| RPAP1 | 15-41821752-TCG-CCA | CgA/TgG | R/W | Rescued nonsense |
| SPTBN5 | 15-42178155-TG-CA | CAc/TGc | H/C | Changed missense |
| IGDCC4 | 15-65676617-TG-CA | cCA/cTG | P/L | Unchanged |
| IGDCC4 | 15-65676617-TGG-CGA | CcA/TcG | P/S | Unchanged |
| IQCH | 15-67692501-GT-AC | cGT/cAC | R/H | Unchanged |
| HCN4 | 15-73614834-TG-CA | cCA/cTG | P/L | Unchanged |
| GOLGA6C | 15-75556026-TG-CA | aTG/aCA | M/T | Partially changed missense |
| GOLGA6D | 15-75582008-TG-CA | TGg/CAg | W/Q | Rescued nonsense |
| CSPG4 | 15-75982185-TG-CA | cCA/cTG | P/L | Unchanged |
| ADAMTS7 | 15-79058695-TG-CA | aCA/aTG | T/M | Changed missense |
| ADAMTS7 | 15-79068536-TG-CA | CAg/TGg | Q/W | Rescued nonsense |
| FAM154B | 15-82574879-TG-CA | TGg/CAg | W/Q | Rescued nonsense |
| FAM154B | 15-82574879-TGG-CGA | TgG/CgA | W/R | Rescued nonsense |
| AKAP13 | 15-86122779-TG-CA | TGg/CAg | W/Q | Rescued nonsense |
| AKAP13 | 15-86124946-TG-CA | aTG/aCA | M/T | Partially changed missense |
| ACAN | 15-89392743-GCT-ACC | GcT/AcC | A/T | Unchanged |
| GDPGP1 | 15-90784250-TG-CA | aTG/aCA | M/T | Partially changed missense |
| SYNM | 15-99653800-TG-CA | gTG/gCA | V/A | Unchanged |
| CERS3 | 15-100943044-GT-AC | gAC/gGT | D/G | Unchanged |
| PIGQ | 16-633353-TG-CA | TGt/CAt | C/H | Changed missense |
| WDR90 | 16-705360-TG-CA | gTG/gCA | V/A | Unchanged |
| WDR90 | 16-705844-TTG-CTA | TtG/CtA | L | Unchanged |
| TPSG1 | 16-1271938-TG-CA | tCA/tTG | S/L | Unchanged |
| ZNF598 | 16-2048704-TG-CA | CAg/TGg | Q/W | Rescued nonsense |
| ZNF598 | 16-2049849-TG-CA | aCA/aTG | T/M | Changed missense |
| TSC2 | 16-2138267-GAT-AAC | GaT/AaC | D/N | Unchanged |
| SLX4 | 16-3650991-TG-CA | cCA/cTG | P/L | Unchanged |
| NAGPA | 16-5075633-GT-AC | ACt/GTt | T/V | Changed missense |
| CTD-3088G3.8 | 16-11540712-TG-CA | aCA/aTG | T/M | Changed missense |
| ERCC4 | 16-14014069-TG-CA | cTG/cCA | L/P | Unchanged |
| SMG1 | 16-18839362-TG-CA | gCA/gTG | A/V | Unchanged |
| ACSM2B | 16-20570659-GAT-AAC | AtC/GtT | I/V | Unchanged |
| DNAH3 | 16-20963765-GGT-CGA | AcC/TcG | T/S | Unchanged |
| SDR42E2 | 16-22178256-GT-AC | cGT/cAC | R/H | Unchanged |
| ZKSCAN2 | 16-25263336-GT-CA | cAC/cTG | H/L | Partially changed missense |
| APOBR | 16-28508716-TG-CA | gTG/gCA | V/A | Unchanged |
| PRRT2 | 16-29825126-TTG-CTA | TtG/CtA | L | Unchanged |
| SEZ6L2 | 16-29883777-TAG-CAA | CtA/TtG | L | Unchanged |
| HSD3B7 | 16-30999461-GT-AC | cGT/cAC | R/H | Unchanged |
| ABCC11 | 16-48201432-TG-CA | CAc/TGc | H/C | Changed missense |
| SLC12A3 | 16-56904140-TG-CA | cTG/cCA | L/P | Unchanged |
| E2F4 | 16-67228632-TG-CA | gTG/gCA | V/A | Unchanged |
| FHOD1 | 16-67266065-TG-CA | aCA/aTG | T/M | Changed missense |
| FAM65A | 16-67563735-TGG-CGA | TgG/CgA | W/R | Rescued nonsense |
| CDH1 | 16-68857439-GCT-ACC | GcT/AcC | A/T | Unchanged |
| COG8 | 16-69373414-TG-CA | aCA/aTG | T/M | Changed missense |
| CLEC18A | 16-69988319-TG-CA | cTG/cCA | L/P | Unchanged |
| CLEC18A | 16-69988372-GT-AC | GTg/ACg | V/T | Changed missense |
| CLEC18A | 16-69988373-TG-CA | gTG/gCA | V/A | Unchanged |
| NPIPB15 | 16-74425793-TCG-CCA | TcG/CcA | S/P | Unchanged |
| TAF1C | 16-84215390-TG-CA | gCA/gTG | A/V | Unchanged |
| ZCCHC14 | 16-87445363-GT-AC | cAC/cGT | H/R | Unchanged |
| PIEZO1 | 16-88783098-GAT-AAC | AtC/GtT | I/V | Unchanged |
| PIEZO1 | 16-88791457-TG-CA | cCA/cTG | P/L | Unchanged |
| PIEZO1 | 16-88807895-TG-CA | cCA/cTG | P/L | Unchanged |
| ACSF3 | 16-89167402-GAT-AAC | GaT/AaC | D/N | Unchanged |
| MYO1C | 17-1373518-TG-CA | CAg/TGg | Q/W | Rescued nonsense |
| WDR81 | 17-1630991-TG-CA | cTG/cCA | L/P | Unchanged |
| SMYD4 | 17-1686409-GT-AC | tAC/tGT | Y/C | Unchanged |
| MNT | 17-2298615-TG-CA | cCA/cTG | P/L | Unchanged |
| ITGAE | 17-3657173-GAT-AAC | AtC/GtT | I/V | Unchanged |
| ZZEF1 | 17-3912208-GT-AC | ACg/GTg | T/V | Changed missense |
| ZZEF1 | 17-3953083-TG-CA | cCA/cTG | P/L | Unchanged |
| GLTPD2 | 17-4693170-TG-CA | gTG/gCA | V/A | Unchanged |
| AIPL1 | 17-6330068-TG-CA | cCA/cTG | P/L | Unchanged |
| SLC35G6 | 17-7386279-TG-CA | TGg/CAg | W/Q | Rescued nonsense |
| PER1 | 17-8048169-TG-CA | aCA/aTG | T/M | Changed missense |
| PFAS | 17-8167600-TG-CA | cTG/cCA | L/P | Unchanged |
| MYH3 | 17-10543463-TG-CA | gCA/gTG | A/V | Unchanged |
| CDRT1 | 17-15510986-GTT-ATC | AaC/GaT | N/D | Unchanged |
| RP11-385D13.1 | 17-15510986-GTT-ATC | AaC/GaT | N/D | Unchanged |
| NOS2 | 17-26115949-TG-CA | cCA/cTG | P/L | Unchanged |
| ABHD15 | 17-27889985-GT-AC | ACc/GTc | T/V | Changed missense |
| SLFN14 | 17-33884804-TG-CA | CAg/TGg | Q/W | Rescued nonsense |
| KRT28 | 17-38950272-TG-CA | aCA/aTG | T/M | Changed missense |
| KRTAP1-4 | 17-39186097-GT-AC | tAC/tGT | Y/C | Unchanged |
| KRT32 | 17-39619093-GT-AC | aAC/aGT | N/S | Unchanged |
| KRT32 | 17-39623363-TG-CA | CAg/TGg | Q/W | Rescued nonsense |
| RUNDC1 | 17-41133071-TG-CA | TGg/CAg | W/Q | Rescued nonsense |
| MPP2 | 17-41960343-TG-CA | aCA/aTG | T/M | Changed missense |
| MPP2 | 17-41960634-GT-CA | cAC/cTG | H/L | Partially changed missense |
| KIF18B | 17-43003484-TG-CA | gCA/gTG | A/V | Unchanged |
| WNT9B | 17-44950122-TG-CA | aTG/aCA | M/T | Partially changed missense |
| B4GALNT2 | 17-47246163-TG-CA | TGc/CAc | C/H | Changed missense |
| COL1A1 | 17-48265493-GGT-AGC | AcC/GcT | T/A | Unchanged |
| RSAD1 | 17-48557348-TG-CA | tTG/tCA | L/S | Unchanged |
| BZRAP1 | 17-56396609-TG-CA | CAg/TGg | Q/W | Rescued nonsense |
| MTMR4 | 17-56572524-TG-CA | aCA/aTG | T/M | Changed missense |
| MTMR4 | 17-56584506-GCT-ACC | AgC/GgT | S/G | Unchanged |
| C17orf47 | 17-56621359-TG-CA | tCA/tTG | S/L | Unchanged |
| KCNH6 | 17-61611421-GAT-AAC | GaT/AaC | D/N | Unchanged |
| ARSG | 17-66364804-TG-CA | TGg/CAg | W/Q | Rescued nonsense |
| C17orf80 | 17-71232807-TG-CA | TGt/CAt | C/H | Changed missense |
| TTYH2 | 17-72233559-GT-AC | GTt/ACt | V/T | Changed missense |
| NAT9 | 17-72769136-TG-CA | CAg/TGg | Q/W | Rescued nonsense |
| RECQL5 | 17-73625430-GT-AC | cAC/cGT | H/R | Unchanged |
| RECQL5 | 17-73625478-TG-CA | aCA/aTG | T/M | Changed missense |
| EVPL | 17-74014668-TG-CA | CAg/TGg | Q/W | Rescued nonsense |
| QRICH2 | 17-74288262-TG-CA | CAt/TGt | H/C | Changed missense |
| C17orf99 | 17-76157266-TG-CA | TGg/CAg | W/Q | Rescued nonsense |
| TK1 | 17-76178748-TG-CA | gCA/gTG | A/V | Unchanged |
| C1QTNF1 | 17-77040127-GT-AC | cGT/cAC | R/H | Unchanged |
| ENPP7 | 17-77704912-TG-CA | cTG/cCA | L/P | Unchanged |
| ENPP7 | 17-77705043-GAT-AAC | GaT/AaC | D/N | Unchanged |
| SLC38A10 | 17-79220016-TG-CA | gCA/gTG | A/V | Unchanged |
| TSPAN10 | 17-79612382-TG-CA | gTG/gCA | V/A | Unchanged |
| SLC25A10 | 17-79682557-GT-AC | cGT/cAC | R/H | Unchanged |
| PYCR1 | 17-79891147-TG-CA | tCA/tTG | S/L | Unchanged |
| ASPSCR1 | 17-79974729-GAT-AAC | GaT/AaC | D/N | Unchanged |
| ZNF750 | 17-80788465-TG-CA | gCA/gTG | A/V | Unchanged |
| TBCD | 17-80887242-GAT-AAC | GaT/AaC | D/N | Unchanged |
| COLEC12 | 18-334758-TG-CA | cCA/cTG | P/L | Unchanged |
| LAMA1 | 18-6999628-TG-CA | tCA/tTG | S/L | Unchanged |
| MOCOS | 18-33848581-TG-CA | gTG/gCA | V/A | Unchanged |
| MRO | 18-48331524-GT-AC | gAC/gGT | D/G | Unchanged |
| SERPINB4 | 18-61308176-GT-AC | ACt/GTt | T/V | Changed missense |
| ZNF516 | 18-74154999-GT-AC | aAC/aGT | N/S | Unchanged |
| LPPR3 | 19-813219-GT-AC | ACg/GTg | T/V | Changed missense |
| GRIN3B | 19-1004740-TG-CA | TGg/CAg | W/Q | Rescued nonsense |
| MOB3A | 19-2078488-TG-CA | cCA/cTG | P/L | Unchanged |
| CACTIN | 19-3611972-GT-AC | aAC/aGT | N/S | Unchanged |
| TJP3 | 19-3750615-TG-CA | aTG/aCA | M/T | Partially changed missense |
| FSD1 | 19-4306310-GT-AC | cGT/cAC | R/H | Unchanged |
| TICAM1 | 19-4818378-TG-CA | aCA/aTG | T/M | Changed missense |
| FUT5 | 19-5866736-TG-CA | CAc/TGc | H/C | Changed missense |
| EMR1 | 19-6926378-TG-CA | aTG/aCA | M/T | Partially changed missense |
| AC025278.1 | 19-7011826-TG-CA | TGg/CAg | W/Q | Rescued nonsense |
| STXBP2 | 19-7711219-GAT-AAC | GaT/AaC | D/N | Unchanged |
| LRRC8E | 19-7963976-TG-CA | aTG/aCA | M/T | Partially changed missense |
| FBN3 | 19-8181644-TG-CA | CAa/TGa | Q/* | Unchanged |
| MBD3L1 | 19-8953799-GTT-ATC | GtT/AtC | V/I | Unchanged |
| MUC16 | 19-9003645-GT-AC | ACt/GTt | T/V | Changed missense |
| MUC16 | 19-9048421-TG-CA | aCA/aTG | T/M | Changed missense |
| MUC16 | 19-9060812-TG-CA | tCA/tTG | S/L | Unchanged |
| DNMT1 | 19-10291181-TG-CA | CAt/TGt | H/C | Changed missense |
| ICAM3 | 19-10449512-GAT-AAC | AtC/GtT | I/V | Unchanged |
| DOCK6 | 19-11319491-GT-AC | aAC/aGT | N/S | Unchanged |
| DOCK6 | 19-11319491-GTT-ATC | AaC/GaT | N/D | Unchanged |
| PRKCSH | 19-11553279-GCT-ACC | GcT/AcC | A/T | Unchanged |
| RNASEH2A | 19-12921186-TG-CA | tTG/tCA | L/S | Unchanged |
| DNASE2 | 19-12989560-GCT-ACC | AgC/GgT | S/G | Unchanged |
| C19orf57 | 19-14000170-TG-CA | CAg/TGg | Q/W | Rescued nonsense |
| OR7A5 | 19-14938833-GT-AC | ACt/GTt | T/V | Changed missense |
| NOTCH3 | 19-15302844-TG-CA | gCA/gTG | A/V | Unchanged |
| CYP4F3 | 19-15763720-TG-CA | gTG/gCA | V/A | Unchanged |
| OR10H5 | 19-15905271-TG-CA | cTG/cCA | L/P | Unchanged |
| OR10H1 | 19-15918500-GGT-AGC | AcC/GcT | T/A | Unchanged |
| CPAMD8 | 19-17004049-TG-CA | CAg/TGg | Q/W | Rescued nonsense |
| MYO9B | 19-17316781-GT-AC | GTt/ACt | V/T | Changed missense |
| IL12RB1 | 19-18186618-TG-CA | CAg/TGg | Q/W | Rescued nonsense |
| KIAA1683 | 19-18375815-GT-AC | aAC/aGT | N/S | Unchanged |
| COPE | 19-19011244-TG-CA | cCA/cTG | P/L | Unchanged |
| ZNF729 | 19-22498942-GT-AC | tGT/tAC | C/Y | Unchanged |
| APLP1 | 19-36370010-TG-CA | gTG/gCA | V/A | Unchanged |
| LGALS14 | 19-40197924-TG-CA | TGt/CAt | C/H | Changed missense |
| PSG8 | 19-43269704-TG-CA | aCA/aTG | T/M | Changed missense |
| PSG4 | 19-43709659-TG-CA | aCA/aTG | T/M | Changed missense |
| ZNF221 | 19-44470420-TG-CA | TGt/CAt | C/H | Changed missense |
| ZNF180 | 19-44981832-TG-CA | CAt/TGt | H/C | Changed missense |
| PPP5D1 | 19-47030234-TG-CA | gCA/gTG | A/V | Unchanged |
| CCDC9 | 19-47774772-TG-CA | cTG/cCA | L/P | Unchanged |
| VRK3 | 19-50491733-GCT-ACC | AgC/GgT | S/G | Unchanged |
| KLK14 | 19-51584951-TG-CA | CAg/TGg | Q/W | Rescued nonsense |
| ZNF577 | 19-52376119-GT-AC | ACt/GTt | T/V | Changed missense |
| ZNF615 | 19-52497745-TG-CA | CAg/TGg | Q/W | Rescued nonsense |
| VN1R2 | 19-53761740-TG-CA | TGc/CAc | C/H | Changed missense |
| MBOAT7 | 19-54677759-TG-CA | cCA/cTG | P/L | Unchanged |
| MBOAT7 | 19-54677759-TGG-CGA | CcA/TcG | P/S | Unchanged |
| LILRB3 | 19-54726226-TG-CA | gCA/gTG | A/V | Unchanged |
| LILRA4 | 19-54844900-TG-CA | gCA/gTG | A/V | Unchanged |
| KIR2DL1 | 19-55286650-TG-CA | cTG/cCA | L/P | Unchanged |
| TMEM86B | 19-55738634-TG-CA | CAc/TGc | H/C | Changed missense |
| SSC5D | 19-56024519-TG-CA | cTG/cCA | L/P | Unchanged |
| ZSCAN5D | 19-56751782-TG-CA | TGc/CAc | C/H | Changed missense |
| ZNF749 | 19-57956186-TG-CA | gTG/gCA | V/A | Unchanged |
| ADCY3 | 2-25046090-TG-CA | tCA/tTG | S/L | Unchanged |
| SLC5A6 | 2-27423929-TG-CA | cCA/cTG | P/L | Unchanged |
| AC074091.13 | 2-27930502-GT-CA | aAC/aTG | N/M | Changed missense |
| FAM179A | 2-29246044-TG-CA | gTG/gCA | V/A | Unchanged |
| ARHGAP25 | 2-69049941-TG-CA | aTG/aCA | M/T | Partially changed missense |
| ASPRV1 | 2-70188675-GT-AC | ACt/GTt | T/V | Changed missense |
| REG3G | 2-79253947-TG-CA | aTG/aCA | M/T | Partially changed missense |
| CTNNA2 | 2-80801344-GTT-ATC | GtT/AtC | V/I | Unchanged |
| IGKJ3 | 2-89160737-GAT-AAC | AtC/GtT | I/V | Unchanged |
| IGKV1-5 | 2-89247011-GCT-ACC | AgC/GgT | S/G | Unchanged |
| IGKV1-8 | 2-89292169-GT-AC | ACa/GTa | T/V | Changed missense |
| IGKV3-15 | 2-89384784-GAT-AAC | AtC/GtT | I/V | Unchanged |
| IGKV3-15 | 2-89384814-GAT-CAA | AtC/TtG | I/L | Changed missense |
| TUBA3E | 2-130951584-TG-CA | tCA/tTG | S/L | Unchanged |
| LRP2 | 2-170103336-TG-CA | aCA/aTG | T/M | Changed missense |
| TTN | 2-179430997-GT-AC | ACg/GTg | T/V | Changed missense |
| FSIP2 | 2-186656956-TG-CA | aTG/aCA | M/T | Partially changed missense |
| SLC40A1 | 2-190430141-TAG-CAA | CtA/TtG | L | Unchanged |
| MYO1B | 2-192279327-TTG-CTA | TtG/CtA | L | Unchanged |
| RAPH1 | 2-204305093-TG-CA | cCA/cTG | P/L | Unchanged |
| PIKFYVE | 2-209190330-TG-CA | tTG/tCA | L/S | Unchanged |
| ABCA12 | 2-215865575-TG-CA | cCA/cTG | P/L | Unchanged |
| IRS1 | 2-227661043-TG-CA | gCA/gTG | A/V | Unchanged |
| COL4A3 | 2-228111435-TG-CA | cTG/cCA | L/P | Unchanged |
| SP140 | 2-231175549-TG-CA | TGt/CAt | C/H | Changed missense |
| SP100 | 2-231406680-TG-CA | aTG/aCA | M/T | Partially changed missense |
| UGT1A5 | 2-234621780-TG-CA | tTG/tCA | L/S | Unchanged |
| UGT1A5 | 2-234621810-TG-CA | gTG/gCA | V/A | Unchanged |
| ESPNL | 2-239039637-TG-CA | gTG/gCA | V/A | Unchanged |
| ESPNL | 2-239040185-GGT-AGC | GgT/AgC | G/S | Unchanged |
| OR6B3 | 2-240985347-GT-AC | ACc/GTc | T/V | Changed missense |
| PASK | 2-242066374-GT-AC | aAC/aGT | N/S | Unchanged |
| SIRPG | 20-1610894-GT-AC | tAC/tGT | Y/C | Unchanged |
| TGM6 | 20-2375106-GT-AC | GTc/ACc | V/T | Changed missense |
| BFSP1 | 20-17474968-TG-CA | cCA/cTG | P/L | Unchanged |
| CSTL1 | 20-23424613-TG-CA | TGg/CAg | W/Q | Rescued nonsense |
| CST3 | 20-23618395-TAG-CAA | CtA/TtG | L | Unchanged |
| PYGB | 20-25264812-GAT-AAC | GaT/AaC | D/N | Unchanged |
| SEMG2 | 20-43851094-GT-AC | aGT/aAC | S/N | Unchanged |
| PREX1 | 20-47249170-GT-AC | aAC/aGT | N/S | Unchanged |
| PCK1 | 20-56139402-GT-AC | gGT/gAC | G/D | Unchanged |
| ZBP1 | 20-56186884-TG-CA | CAg/TGg | Q/W | Rescued nonsense |
| GATA5 | 20-61039958-TG-CA | cCA/cTG | P/L | Unchanged |
| C20orf166 | 20-61162266-GT-AC | GTg/ACg | V/T | Changed missense |
| C20orf166 | 20-61162267-TG-CA | gTG/gCA | V/A | Unchanged |
| C20orf166 | 20-61167882-TG-CA | TGa/CAa | */Q | Unchanged |
| DIDO1 | 20-61528074-TG-CA | gCA/gTG | A/V | Unchanged |
| TNFRSF6B | 20-62328452-GT-AC | cGT/cAC | R/H | Unchanged |
| MX1 | 21-42821112-GT-AC | cGT/cAC | R/H | Unchanged |
| TMPRSS2 | 21-42866296-TG-CA | aCA/aTG | T/M | Changed missense |
| UMODL1 | 21-43531008-TG-CA | aTG/aCA | M/T | Partially changed missense |
| RRP1 | 21-45219522-GTT-ATC | GtT/AtC | V/I | Unchanged |
| C21orf33 | 21-45553595-GT-AC | GTc/ACc | V/T | Changed missense |
| AIRE | 21-45717548-GAT-AAC | GaT/AaC | D/N | Unchanged |
| KRTAP10-1 | 21-45959854-TG-CA | gCA/gTG | A/V | Unchanged |
| KRTAP10-2 | 21-45971225-TG-CA | cCA/cTG | P/L | Unchanged |
| KRTAP10-3 | 21-45977994-GT-AC | ACg/GTg | T/V | Changed missense |
| KRTAP10-3 | 21-45978338-TG-CA | cCA/cTG | P/L | Unchanged |
| KRTAP10-6 | 21-46011718-TG-CA | cCA/cTG | P/L | Unchanged |
| KRTAP10-6 | 21-46011718-TGG-CGA | CcA/TcG | P/S | Unchanged |
| KRTAP10-6 | 21-46012154-GT-AC | ACc/GTc | T/V | Changed missense |
| COL6A1 | 21-47410929-GGT-AGC | GgT/AgC | G/S | Unchanged |
| COL6A2 | 21-47538960-GT-AC | aGT/aAC | S/N | Unchanged |
| PCNT | 21-47787001-GT-AC | GTg/ACg | V/T | Changed missense |
| PCNT | 21-47787002-TG-CA | gTG/gCA | V/A | Unchanged |
| AC008132.13 | 22-18835523-TG-CA | gTG/gCA | V/A | Unchanged |
| IGLV7-46 | 22-22724394-TG-CA | tTG/tCA | L/S | Unchanged |
| IGLV1-40 | 22-22764409-GGT-CGA | GgT/CgA | G/R | Unchanged |
| IGLV2-23 | 22-23040770-GT-CA | aGT/aCA | S/T | Partially changed missense |
| IGLV2-11 | 22-23135287-GT-CA | gGT/gCA | G/A | Unchanged |
| IGLV3-1 | 22-23223435-GAT-AAC | GaT/AaC | D/N | Unchanged |
| CABIN1 | 22-24459437-GT-AC | tGT/tAC | C/Y | Unchanged |
| MYO18B | 22-26194044-GT-AC | gGT/gAC | G/D | Unchanged |
| SEC14L6 | 22-30934816-TG-CA | CAa/TGa | Q/* | Unchanged |
| MORC2 | 22-31333631-TG-CA | cCA/cTG | P/L | Unchanged |
| APOL1 | 22-36661565-TG-CA | aTG/aCA | M/T | Partially changed missense |
| C22orf23 | 22-38341134-TG-CA | aCA/aTG | T/M | Changed missense |
| APOBEC3F | 22-39448283-TG-CA | TGg/CAg | W/Q | Rescued nonsense |
| ARFGAP3 | 22-43195109-TG-CA | CAg/TGg | Q/W | Rescued nonsense |
| PARVB | 22-44395451-TG-CA | TGg/CAg | W/Q | Rescued nonsense |
| PRR5 | 22-45075738-TG-CA | aTG/aCA | M/T | Partially changed missense |
| C22orf26 | 22-46447714-TG-CA | CAg/TGg | Q/W | Rescued nonsense |
| CTA-299D3.8 | 22-48940551-GCT-ACC | AgC/GgT | S/G | Unchanged |
| DENND6B | 22-50754648-TG-CA | gCA/gTG | A/V | Unchanged |
| LMF2 | 22-50944128-GT-AC | cAC/cGT | H/R | Unchanged |
| EFHB | 3-19959756-GT-AC | ACc/GTc | T/V | Changed missense |
| TRANK1 | 3-36898715-GT-AC | ACc/GTc | T/V | Changed missense |
| PLCD1 | 3-38051941-TG-CA | cCA/cTG | P/L | Unchanged |
| XYLB | 3-38401838-GT-AC | gGT/gAC | G/D | Unchanged |
| SCN5A | 3-38674712-TG-CA | gCA/gTG | A/V | Unchanged |
| XIRP1 | 3-39229900-TG-CA | CAg/TGg | Q/W | Rescued nonsense |
| CDCP1 | 3-45134822-TG-CA | CAa/TGa | Q/* | Unchanged |
| CCDC71 | 3-49200692-TG-AC | CAg/GTg | Q/V | Changed missense |
| BSN | 3-49693411 -TG-CA | cTG/cCA | L/P | Unchanged |
| GMPPB | 3-49760039-TG-CA | CAg/TGg | Q/W | Rescued nonsense |
| CAMKV | 3-49897244-TG-AC | CAg/GTg | Q/V | Changed missense |
| PCBP4 | 3-51994587-TG-CA | gCA/gTG | A/V | Unchanged |
| RP11- | 3-51994587-TG-CA | gCA/gTG | A/V | Unchanged |
| 155D18.14 | | | | |
| PRKCD | 3-53213655-GAT-AAC | GaT/AaC | D/N | Unchanged |
| FLNB | 3-58118555-GT-AC | GTg/ACg | V/T | Changed missense |
| FRMD4B | 3-69245453-GT-AC | ACg/GTg | T/V | Changed missense |
| EPHA3 | 3-89521693-TG-CA | TGg/CAg | W/Q | Rescued nonsense |
| OR5K1 | 3-98189157-TG-CA | tTG/tCA | L/S | Unchanged |
| DPPA4 | 3-109049384-TG-CA | cCA/cTG | P/L | Unchanged |
| FBXO40 | 3-121340536-TG-CA | gTG/gCA | V/A | Unchanged |
| GOLGB1 | 3-121435621-TTG-CTA | CaA/TaG | Q/* | Unchanged |
| MYLK | 3-123452838-GGT-AGC | AcC/GcT | T/A | Unchanged |
| ALDH1L1 | 3-125826058-GT-AC | gAC/gGT | D/G | Unchanged |
| EFCAB12 | 3-129140489-TG-CA | aCA/aTG | T/M | Changed missense |
| PLXND1 | 3-129293182-GT-AC | cAC/cGT | H/R | Unchanged |
| PLXND1 | 3-129293183-TG-CA | CAc/TGc | H/C | Changed missense |
| SLCO2A1 | 3-133670073-TCG-CCA | CgA/TgG | R/W | Rescued nonsense |
| DZIP1L | 3-137796377-GGT-AGC | AcC/GcT | T/A | Unchanged |
| HLTF | 3-148759325-TG-CA | gCA/gTG | A/V | Unchanged |
| IGSF10 | 3-151154666-TG-CA | aCA/aTG | T/M | Changed missense |
| RARRES1 | 3-158450079-GT-AC | gAC/gGT | D/G | Unchanged |
| NCEH1 | 3-172428782-TG-CA | CAg/TGg | Q/W | Rescued nonsense |
| AHSG | 3-186337713-TG-CA | aTG/aCA | M/T | Partially changed missense |
| LRRC15 | 3-194081152-GTT-ATC | AaC/GaT | N/D | Unchanged |
| LRRC15 | 3-194081635-TG-CA | gCA/gTG | A/V | Unchanged |
| MUC4 | 3-195505662-TGG-CGA | CcA/TcG | P/S | Unchanged |
| MUC4 | 3-195507322-GT-AC | ACc/GTc | T/V | Changed missense |
| MUC4 | 3-195515386-GT-AC | ACc/GTc | T/V | Changed missense |
| MUC4 | 3-195515482-GT-AC | ACc/GTc | T/V | Changed missense |
| PIGZ | 3-196674973-TG-CA | gCA/gTG | A/V | Unchanged |
| MFI2 | 3-196742290-TG-CA | cCA/cTG | P/L | Unchanged |
| GAK | 4-858941-TG-CA | gCA/gTG | A/V | Unchanged |
| SLC26A1 | 4-983060-TG-CA | CAg/TGg | Q/W | Rescued nonsense |
| FAM53A | 4-1657281-GGT-AGC | AcC/GcT | T/A | Unchanged |
| HAUS3 | 4-2242083-TTG-ATC | CaA/GaT | Q/D | Changed missense |
| GRK4 | 4-3037213-TG-CA | cTG/cCA | L/P | Unchanged |
| GRK4 | 4-3039150-TG-CA | gTG/gCA | V/A | Unchanged |
| LYAR | 4-4276131-GT-AC | cAC/cGT | H/R | Unchanged |
| LYAR | 4-4276132-TG-CA | CAc/TGc | H/C | Changed missense |
| EVC2 | 4-5624669-GT-AC | ACg/GTg | T/V | Changed missense |
| PSAPL1 | 4-7436151-TG-CA | cCA/cTG | P/L | Unchanged |
| SORCS2 | 4-7714488-GAT-AAC | GaT/AaC | D/N | Unchanged |
| USP17L10 | 4-9213568-GT-AC | GTa/ACa | V/T | Changed missense |
| PPARGC1A | 4-23815924-TG-CA | aCA/aTG | T/M | Changed missense |
| RFC1 | 4-39302029-TG-CA | cCA/cTG | P/L | Unchanged |
| NFXL1 | 4-47887536-TG-CA | gCA/gTG | A/V | Unchanged |
| FRYL | 4-48582909-GCT-ACC | AgC/GgT | S/G | Unchanged |
| CLOCK | 4-56314977-GT-AC | ACa/GTa | T/V | Changed missense |
| NOA1 | 4-57829649-GT-AC | aAC/aGT | N/S | Unchanged |
| TMPRSS11A | 4-68784774-TG-CA | CAg/TGg | Q/W | Rescued nonsense |
| UGT2B17 | 4-69416556-TG-CA | gCA/gTG | A/V | Unchanged |
| UGT2B4 | 4-70346496-GT-AC | cAC/cGT | H/R | Unchanged |
| SMR3A | 4-71232430-TG-CA | TGt/CAt | C/H | Changed missense |
| HSD17B11 | 4-88258483-TG-CA | CAa/TGa | Q/* | Unchanged |
| HERC6 | 4-89311962-TG-CA | TGt/CAt | C/H | Changed missense |
| SMARCAD1 | 4-95170839-GT-AC | aGT/aAC | S/N | Unchanged |
| ALPK1 | 4-113353285-TG-CA | aTG/aCA | M/T | Partially changed missense |
| HSPA4L | 4-128723042-TG-CA | tTG/tCA | L/S | Unchanged |
| PCDH18 | 4-138442525-GGT-AGC | AcC/GcT | T/A | Unchanged |
| KIAA0922 | 4-154479429-GT-AC | cGT/cAC | R/H | Unchanged |
| PALLD | 4-169433326-TG-CA | aTG/aCA | M/T | Partially changed missense |
| CCDC110 | 4-186379371-GT-AC | tAC/tGT | Y/C | Unchanged |
| CYP4V2 | 4-187122354-GT-AC | tGT/tAC | C/Y | Unchanged |
| FAT1 | 4-187557893-TG-CA | CAc/TGc | H/C | Changed missense |
| SDHA | 5-228312-GAT-AAC | GaT/AaC | D/N | Unchanged |
| SLC12A7 | 5-1063998-GT-AC | tAC/tGT | Y/C | Unchanged |
| CCT5 | 5-10256160-GT-AC | cGT/cAC | R/H | Unchanged |
| SLC45A2 | 5-33954511-TG-CA | aCA/aTG | T/M | Changed missense |
| EGFLAM | 5-38370537-TG-CA | TGg/CAg | W/Q | Rescued nonsense |
| MROH2B | 5-41000343-GT-AC | tAC/tGT | Y/C | Unchanged |
| MROH2B | 5-41057374-TG-CA | CAg/TGg | Q/W | Rescued nonsense |
| BDP1 | 5-708Q6958-GT-AC | GTg/ACg | V/T | Changed missense |
| TNPO1 | 5-72183986-TG-CA | gTG/gCA | V/A | Unchanged |
| GDF9 | 5-132198199-GGT-AGC | AcC/GcT | T/A | Unchanged |
| SEC24A | 5-134032907-GT-CA | aGT/aCA | S/T | Partially changed missense |
| TMEM173 | 5-138857919-TG-CA | CAt/TGt | H/C | Changed missense |
| WDR55 | 5-140048267-TG-CA | TGt/CAt | C/H | Changed missense |
| PCDHA1 | 5-140166017-GTT-ATC | GtT/AtC | V/I | Unchanged |
| PCDHA11 | 5-140250252-TTG-CTA | TtG/CtA | L | Unchanged |
| PCDHA13 | 5-140263420-TTG-CTA | TtG/CtA | L | Unchanged |
| PCDHB5 | 5-14Q517174-TCG-CCA | TcG/CcA | S/P | Unchanged |
| PCDHB16 | 5-140563980-GGT-AGC | GgT/AgC | G/S | Unchanged |
| SPINKS | 5-147510865-GT-AC | gGT/gAC | G/D | Unchanged |
| SH3TC2 | 5-148386525-TG-CA | cCA/cTG | P/L | Unchanged |
| TIGD6 | 5-149374932-TG-CA | CAg/TGg | Q/W | Rescued nonsense |
| CSF1R | 5-149450132-TG-CA | CAc/TGc | H/C | Changed missense |
| PDGFRB | 5-149495395-TG-CA | cCA/cTG | P/L | Unchanged |
| THG1L | 5-157164962-TG-CA | cTG/cCA | L/P | Unchanged |
| CCNJL | 5-159686502-TG-CA | CAt/TGt | H/C | Changed missense |
| STK10 | 5-171520554-TG-CA | cCA/cTG | P/L | Unchanged |
| AC027309.1 | 5-172036332-TG-CA | aCA/aTG | T/M | Changed missense |
| CDHR2 | 5-176004476-TG-CA | gTG/gCA | V/A | Unchanged |
| ZNF354B | 5-178293284-TGG-CGA | TgG/CgA | W/R | Rescued nonsense |
| SLC22A23 | 6-3287118-TG-CA | tCA/tTG | S/L | Unchanged |
| MCUR1 | 6-13814338-GCT-ACC | AgC/GgT | S/G | Unchanged |
| GPLD1 | 6-24437445-GT-AC | ACa/GTa | T/V | Changed missense |
| BTN2A1 | 6-26468434-TG-CA | cTG/cCA | L/P | Unchanged |
| HLA-C | 6-31237771-GGT-AGC | AcC/GcT | T/A | Unchanged |
| MICA | 6-31379118-GT-AC | GTa/ACa | V/T | Changed missense |
| ABHD16A | 6-31657413-TAG-CAA | CtA/TtG | L | Unchanged |
| NOTCH4 | 6-32188642-TG-CA | cCA/cTG | P/L | Unchanged |
| HLA-DRB5 | 6-32489939-TG-CA | CAg/TGg | Q/W | Rescued nonsense |
| TAP1 | 6-32814974-GT-AC | gAC/gGT | D/G | Unchanged |
| HLA-DPA1 | 6-33037419-GT-AC | aAC/aGT | N/S | Unchanged |
| RPS10 | 6-34392586-TG-AC | CAg/GTg | Q/V | Changed missense |
| RPS10-NUDT3 | 6-34392586-TG-AC | CAg/GTg | Q/V | Changed missense |
| TFEB | 6-41652604-TG-CA | cCA/cTG | P/L | Unchanged |
| TFEB | 6-41652604-TGG-CGA | CcA/TcG | P/S | Unchanged |
| CUL7 | 6-43014298-TTG-CTA | CaA/TaG | Q/* | Unchanged |
| CUL7 | 6-43014299-TG-CA | CAa/TGa | Q/* | Unchanged |
| DLK2 | 6-43418733-GT-AC | cAC/cGT | H/R | Unchanged |
| SLC25A27 | 6-46623696-GCT-ACC | GcT/AcC | A/T | Unchanged |
| GPR116 | 6-46826844-TG-CA | aCA/aTG | T/M | Changed missense |
| ICK | 6-52878637-TG-CA | cCA/cTG | P/L | Unchanged |
| MDN1 | 6-90482395-GAT-AAC | AtC/GtT | I/V | Unchanged |
| FAXC | 6-99771540-TG-CA | aCA/aTG | T/M | Changed missense |
| PTPRK | 6-128404875-GAT-AAC | AtC/GtT | I/V | Unchanged |
| CTAGE9 | 6-132030028-TG-CA | aCA/aTG | T/M | Changed missense |
| ESR1 | 6-152201874-GT-AC | cGT/cAC | R/H | Unchanged |
| RPS6KA2 | 6-167271710-GT-AC | ACc/GTc | T/V | Changed missense |
| RP11-514012.4 | 6-167271710-GT-AC | ACc/GTc | T/V | Changed missense |
| WDR27 | 6-169972595-GT-AC | cAC/cGT | H/R | Unchanged |
| WDR27 | 6-169972596-TG-CA | CAc/TGc | H/C | Changed missense |
| HEATR2 | 7-810218-GT-AC | GTg/ACg | V/T | Changed missense |
| TMEM184A | 7-1586660-GCT-ACC | AgC/GgT | S/G | Unchanged |
| CARD11 | 7-2946461-TCG-CCA | CgA/TgG | R/W | Rescued nonsense |
| COL28A1 | 7-7413149-TG-CA | cCA/cTG | P/L | Unchanged |
| THSD7A | 7-11521542-TG-CA | cCA/cTG | P/L | Unchanged |
| THSD7A | 7-11581134-TG-CA | gCA/gTG | A/V | Unchanged |
| AGMO | 7-15458186-TG-CA | aCA/aTG | T/M | Changed missense |
| STEAP1B | 7-22533235-TG-CA | CAt/TGt | H/C | Changed missense |
| C7orf31 | 7-25181912-TG-CA | CAt/TGt | H/C | Changed missense |
| SCRN1 | 7-29966141-TG-CA | CAg/TGg | Q/W | Rescued nonsense |
| SPDYE1 | 7-44047066-TG-CA | TGc/CAc | C/H | Changed missense |
| NACAD | 7-45120248-GT-AC | aAC/aGT | N/S | Unchanged |
| C7orf57 | 7-48092484-GAT-AAC | GaT/AaC | D/N | Unchanged |
| ZNF680 | 7-64004108-TG-CA | CAg/TGg | Q/W | Rescued nonsense |
| POM121C | 7-75051375-TG-CA | cCA/cTG | P/L | Unchanged |
| SRCRB4D | 7-76028057-GT-AC | ACg/GTg | T/V | Changed missense |
| SEMA3A | 7-83590852-TG-CA | aCA/aTG | T/M | Changed missense |
| MCM7 | 7-99693078-GAT-AAC | AtC/GtT | l/V | Unchanged |
| ZAN | 7-100386900-TG-CA | TGg/CAg | W/Q | Rescued nonsense |
| MUC17 | 7-100676793-TG-CA | cTG/cCA | L/P | Unchanged |
| LAMB4 | 7-107738882-GT-AC | tAC/tGT | Y/C | Unchanged |
| FLNC | 7-128487864-GAT-AAC | GaT/AaC | D/N | Unchanged |
| PLXNA4 | 7-131864591-TG-CA | gCA/gTG | A/V | Unchanged |
| CNOT4 | 7-135047703-TG-CA | aCA/aTG | T/M | Changed missense |
| DENND2A | 7-140258000-TG-CA | tCA/tTG | S/L | Unchanged |
| TAS2R38 | 7-141672602-GAT-AAC | AtC/GtT | I/V | Unchanged |
| TRBV5-6 | 7-142131851-TG-CA | gCA/gTG | A/V | Unchanged |
| TRPV5 | 7-142625249-TG-CA | aCA/aTG | T/M | Changed missense |
| TAS2R60 | 7-143141474-GT-AC | cGT/cAC | R/H | Unchanged |
| ACTR3C | 7-149983565-TG-CA | CAg/TGg | Q/W | Rescued nonsense |
| WRN | 8-31024654-TG-CA | TGt/CAt | C/H | Changed missense |
| ADHFE1 | 8-67380528-TG-CA | TGt/CAt | C/H | Changed missense |
| KIAA1429 | 8-95504024-TG-CA | CAg/TGg | Q/W | Rescued nonsense |
| TAF2 | 8-120790304-TG-CA | aCA/aTG | T/M | Changed missense |
| ST3GAL1 | 8-134488007-GGT-AGC | AcC/GcT | T/A | Unchanged |
| COL22A1 | 8-139697478-TG-CA | cCA/cTG | P/L | Unchanged |
| SLC45A4 | 8-142222443-GTT-ATC | AaC/GaT | N/D | Unchanged |
| RHPN1 | 8-144462313-TG-CA | cTG/cCA | L/P | Unchanged |
| MROH6 | 8-144649625-TCG-CCA | CgA/TgG | R/W | Rescued nonsense |
| TIGD5 | 8-144680371-TGG-CGA | TgG/CgA | W/R | Rescued nonsense |
| PLEC | 8-144992361-TG-CA | cCA/cTG | P/L | Unchanged |
| GPAA1 | 8-145138621-TG-CA | gTG/gCA | V/A | Unchanged |
| CYHR1 | 8-145689915-GT-AC | cAC/cGT | H/R | Unchanged |
| MPDZ | 9-13219570-TG-CA | aCA/aTG | T/M | Changed missense |
| SLC24A2 | 9-19622268-TG-CA | cCA/cTG | P/L | Unchanged |
| FAM205A | 9-34724580-TG-CA | CAt/TGt | H/C | Changed missense |
| FAM205A | 9-34726418-TG-CA | cCA/cTG | P/L | Unchanged |
| OR13J1 | 9-35870000-GT-AC | cAC/cGT | H/R | Unchanged |
| OR13J1 | 9-35870001-TG-CA | CAc/TGc | H/C | Changed missense |
| FOXD4L6 | 9-69200917-GT-AC | cAC/cGT | H/R | Unchanged |
| FOXD4L5 | 9-70177441-GT-AC | tAC/tGT | Y/C | Unchanged |
| SMC5 | 9-72897440-TG-CA | TGt/CAt | C/H | Changed missense |
| DAPK1 | 9-90322023-GT-AC | aGT/aAC | S/N | Unchanged |
| PTCH1 | 9-98220526-GT-AC | aAC/aGT | N/S | Unchanged |
| GRIN3A | 9-104449294-GT-AC | aAC/aGT | N/S | Unchanged |
| OR13C5 | 9-107361449-TAG-CAA | CtA/TtG | L | Unchanged |
| AKAP2 | 9-112900199-TG-CA | tTG/tCA | L/S | Unchanged |
| PALM2-AKAP2 | 9-112900199-TG-CA | tTG/tCA | L/S | Unchanged |
| SVEP1 | 9-113169630-TG-CA | gCA/gTG | A/V | Unchanged |
| C9orf147 | 9-115249262-TG-CA | cCA/cTG | P/L | Unchanged |
| TNFSF8 | 9-117666499-GT-AC | tAC/tGT | Y/C | Unchanged |
| TNC | 9-117846580-TG-CA | CAg/TGg | Q/W | Rescued nonsense |
| TNC | 9-117848394-TG-CA | CAg/TGg | Q/W | Rescued nonsense |
| ASTN2 | 9-119495697-TG-CA | cCA/cTG | P/L | Unchanged |
| OR1B1 | 9-125391677-TG-CA | aCA/aTG | T/M | Changed missense |
| DENND1A | 9-126144758-TG-CA | tCA/tTG | S/L | Unchanged |
| LMX1B | 9-129455585-TCG-ACC | TcG/AcC | S/T | Unchanged |
| PPAPDC3 | 9-134183502-GT-AC | cGT/cAC | R/H | Unchanged |
| SURF6 | 9-136199466-GT-AC | ACg/GTg | T/V | Changed missense |
| FCN2 | 9-137775154-GT-AC | cGT/cAC | R/H | Unchanged |
| PPP1R26 | 9-138377657-TG-CA | aTG/aCA | M/T | Partially changed missense |
| OBP2A | 9-138440641-TG-CA | aTG/aCA | M/T | Partially changed missense |
| GLT6D1 | 9-138516189-GT-AC | cAC/cGT | H/R | Unchanged |
| QSOX2 | 9-139100805-TG-CA | cCA/cTG | P/L | Unchanged |
| CCDC183 | 9-139700605-TG-CA | TGg/CAg | W/Q | Rescued nonsense |
| ASMTL | X-1554649-TG-CA | aCA/aTG | T/M | Changed missense |
| FTHL17 | X-31089712-TG-CA | CAg/TGg | Q/W | Rescued nonsense |
| FAM47B | X-34961339-TTG-CTA | TtG/CtA | L | Unchanged |
| FAAH2 | X-57405162-GT-AC | cGT/cAC | R/H | Unchanged |
| ABCB7 | X-74284996-TG-CA | gCA/gTG | A/V | Unchanged |
| ZMAT1 | X-101138792-TG-CA | CAg/TGg | Q/W | Rescued nonsense |
| ATP1B4 | X-119500459-TG-CA | gTG/gCA | V/A | Unchanged |
| FAM122C | X-133941714-GT-AC | aGT/aAC | S/N | Unchanged |
| PLXNB3 | X-153041544-TG-CA | aTG/aCA | M/T | Partially changed missense |
| IL9R | X-155239682-GT-AC | GTg/ACg | V/T | Changed missense |

TABLE J
Specific targetable MNV mutations from the gnomAD database that can
be created with SPACE using Cas9 proteins with NGA PAM recognition.

| Gene_name | MNV | MNV_codons | MNV_AAs | MNV_category |
|---|---|---|---|---|
| SAMD11 | 1-877831-TG-CA | TGg/CAg | W/Q | Rescued nonsense |
| NOC2L | 1-888657-GAT-AAC | AtC/GtT | I/V | Unchanged |
| C1orf170 | 1-914874-GCT-ACC | AgC/GgT | S/G | Unchanged |
| CPSF3L | 1-1248279-GT-CA | gAC/gTG | D/V | Partially changed missense |
| CDK11A | 1-1636044-GT-AC | tAC/tGT | Y/C | Unchanged |
| PANK4 | 1-2441358-TG-CA | CAg/TGg | Q/W | Rescued nonsense |
| PRDM16 | 1-3328358-TCG-CCA | TcG/CcA | S/P | Unchanged |
| CCDC27 | 1-3677933-TG-CA | aTG/aCA | M/T | Partially changed missense |
| PER3 | 1-7870047-GT-AC | aGT/aAC | S/N | Unchanged |
| UTS2 | 1-7913430-GT-AC | ACg/GTg | T/V | Changed missense |
| C1orf127 | 1-11008695-TG-CA | cCA/cTG | P/L | Unchanged |
| TNFRSF1B | 1-12252927-GT-AC | GTg/ACg | V/T | Changed missense |
| PRAMEF10 | 1-12954806-TG-CA | aCA/aTG | T/M | Changed missense |
| PRAMEF10 | 1-12954852-TG-CA | CAc/TGc | H/C | Changed missense |
| PRAMEF26 | 1-13219066-TG-CA | CAc/TGc | H/C | Changed missense |
| PRAMEF13 | 1-13448351-TG-CA | CAc/TGc | H/C | Changed missense |
| PADI4 | 1-17657616-TG-CA | gTG/gCA | V/A | Unchanged |
| ARHGEF10L | 1-18023507-GAT-AAC | GaT/AaC | D/N | Unchanged |
| AKR7A3 | 1-19609253-GT-AC | ACt/GTt | T/V | Changed missense |
| PLA2G2C | 1-20490518-TG-CA | CAg/TGg | Q/W | Rescued nonsense |
| VWA5B1 | 1-20644156-TG-CA | TGt/CAt | C/H | Changed missense |
| ID3 | 1-23885497-GT-AC | ACt/GTt | T/V | Changed missense |
| CNR2 | 1-24201919-TTG-CTA | CaA/TaG | Q/* | Unchanged |
| CNR2 | 1-24201920-TG-CA | CAa/TGa | Q/* | Unchanged |
| WASF2 | 1-27736478-TG-CA | cCA/cTG | P/L | Unchanged |
| COL16A1 | 1-32158374-TG-CA | cCA/cTG | P/L | Unchanged |
| C1orf94 | 1-34677815-TG-CA | aTG/aCA | M/T | Partially changed missense |
| MOB3C | 1-47078637-TG-CA | gCA/gTG | A/V | Unchanged |
| PODN | 1-53544597-TG-CA | gTG/gCA | V/A | Unchanged |
| SLC1A7 | 1-53553754-TG-CA | CAg/TGg | Q/W | Rescued nonsense |
| KANK4 | 1-62738904-TG-CA | cCA/cTG | P/L | Unchanged |
| EFCAB7 | 1-63991265-GAT-AAC | GaT/AaC | D/N | Unchanged |
| IL23R | 1-67685387-TG-CA | cTG/cCA | L/P | Unchanged |
| SSX2IP | 1-85113203-TG-CA | gCA/gTG | A/V | Unchanged |
| TGFBR3 | 1-92262874-TG-CA | gCA/gTG | A/V | Unchanged |
| MTF2 | 1-93580580-TG-AC | TGc/ACc | C/T | Changed missense |
| ABCA4 | 1-94473845-TG-CA | cCA/cTG | P/L | Unchanged |
| GSTM5 | 1-110256333-GT-AC | GTt/ACt | V/T | Changed missense |
| GSTM5 | 1-110256333-GTT-ATC | GtT/AtC | V/I | Unchanged |
| IGSF3 | 1-117156584-TG-CA | CAg/TGg | Q/W | Rescued nonsense |
| NBPF14 | 1-148004782-GCT-ACC | AgC/GgT | S/G | Unchanged |
| HRNR | 1-152185789-GT-AC | cAC/cGT | H/R | Unchanged |
| HRNR | 1-152191750-TG-CA | tCA/tTG | S/L | Unchanged |
| HRNR | 1-152192978-TG-CA | CAa/TGa | Q/* | Unchanged |
| FLG | 1-152276391-TCG-CCA | CgA/TgG | R/W | Rescued nonsense |
| FLG | 1-152276827-TG-CA | CAg/TGg | Q/W | Rescued nonsense |
| FLG | 1-152277822-TG-CA | tCA/tTG | S/L | Unchanged |
| FLG | 1-152278335-TCG-CCA | CgA/TgG | R/W | Rescued nonsense |
| FLG | 1-152280372-GT-AC | cAC/cGT | H/R | Unchanged |
| FLG | 1-152285142-TCG-CCA | CgA/TgG | R/W | Rescued nonsense |
| IVL | 1-152882851-TG-CA | cTG/cCA | L/P | Unchanged |
| IQGAP3 | 1-156532977-TTG-CTA | CaA/TaG | Q/* | Unchanged |
| OR6N1 | 1-158735691-TG-CA | CAg/TGg | Q/W | Rescued nonsense |
| FCGR2C | 1-161565478-TG-CA | cTG/cCA | L/P | Unchanged |
| DCAF6 | 1-168013850-TG-CA | gTG/gCA | V/A | Unchanged |
| TNN | 1-175086123-TG-CA | aTG/aCA | M/T | Partially changed missense |
| ASTN1 | 1-176863867-TG-CA | CAc/TGc | H/C | Changed missense |
| RGS16 | 1-182569626-TG-CA | CAc/TGc | H/C | Changed missense |
| LAMC1 | 1-183105533-GT-AC | cGT/cAC | R/H | Unchanged |
| EDEM3 | 1-184677464-GAT-AAC | AtC/GtT | I/V | Unchanged |
| TARBP1 | 1-234569192-TG-CA | gCA/gTG | A/V | Unchanged |
| CNST | 1-246755124-TG-CA | tTG/tCA | L/S | Unchanged |
| OR2T33 | 1-248436965-TG-CA | CAc/TGc | H/C | Changed missense |
| OR2T12 | 1-248458729-TG-CA | CAc/TGc | H/C | Changed missense |
| OR2T29 | 1-248722722-TG-CA | CAa/TGa | Q/* | Unchanged |
| TAF3 | 10-8007560-TG-CA | gTG/gCA | V/A | Unchanged |
| NUDT5 | 10-12209752-TG-CA | gCA/gTG | A/V | Unchanged |
| CUBN | 10-16882518-TG-CA | aCA/aTG | T/M | Changed missense |
| C10ORF68 | 10-33137551-TG-CA | aTG/aCA | M/T | Partially changed missense |
| GPRIN2 | 10-47000004-TG-CA | gTG/gCA | V/A | Unchanged |
| PCDH15 | 10-55996608-TG-CA | cCA/cTG | P/L | Unchanged |
| HKDC1 | 10-71018660-TG-CA | TGg/CAg | W/Q | Rescued nonsense |
| HKDC1 | 10-71018660-TGG-CGA | TgG/CgA | W/R | Rescued nonsense |
| AC022532.1 | 10-72195439-TG-CA | gTG/gCA | V/A | Unchanged |
| NODAL | 10-72195439-TG-CA | CAc/TGc | H/C | Changed missense |
| ADAMTS14 | 10-72500763-TG-CA | cTG/cCA | L/P | Unchanged |
| KAT6B | 10-76789077-GT-AC | GTa/ACa | V/T | Changed missense |
| SFTPA1 | 10-81372092-TG-CA | aTG/aCA | M/T | Partially changed missense |
| LRIT1 | 10-85992511-TG-CA | cCA/cTG | P/L | Unchanged |
| CYP2C19 | 10-96534891-TG-CA | gTG/gCA | V/A | Unchanged |
| ABCC2 | 10-101563815-GT-AC | GTt/ACt | V/T | Changed missense |
| DNMBP | 10-101645498-TG-CA | cCA/cTG | P/L | Unchanged |
| NHLRC2 | 10-115636469-TG-CA | aTG/aCA | M/T | Partially changed missense |
| TACC2 | 10-123845322-TG-CA | TGg/CAg | W/Q | Rescued nonsense |
| PLEKHA1 | 10-124183731-GT-AC | cGT/cAC | R/H | Unchanged |
| C10orf90 | 10-128202435-TG-CA | gCA/gTG | A/V | Unchanged |
| ADAM8 | 10-135085754-GGT-AGC | AcC/GcT | T/A | Unchanged |
| TUBGCP2 | 10-135098672-GT-AC | tAC/tGT | Y/C | Unchanged |
| PIDD | 11-802379-TG-CA | CAa/TGa | Q/* | Unchanged |
| MUC6 | 11-1026093-TG-CA | cCA/cTG | P/L | Unchanged |
| MUC2 | 11-1081074-TG-CA | gTG/gCA | V/A | Unchanged |
| MUC2 | 11-1083291-GAT-AAC | GaT/AaC | D/N | Unchanged |
| MUC5B | 11-1264691-TG-CA | aTG/aCA | M/T | Partially changed missense |
| SYT8 | 11-1857173-TG-CA | TGc/CAc | C/H | Changed missense |
| SYT8 | 11-1857746-GT-AC | cGT/cAC | R/H | Unchanged |
| OR51F1 | 11-4790474-TG-CA | CAc/TGc | H/C | Changed missense |
| OR51B2 | 11-5344772-TG-CA | aCA/aTG | T/M | Changed missense |
| OR56A1 | 11-6048056-TG-CA | gCA/gTG | A/V | Unchanged |
| DNHD1 | 11-6520164-TG-AC | gTG/gAC | V/D | Changed missense |
| CYB5R2 | 11-7687713-GTT-ATC | AaC/GaT | N/D | Unchanged |
| TRIM66 | 11-8662090-TG-CA | CAt/TGt | H/C | Changed missense |
| TRIM66 | 11-8662516-TG-CA | CAc/TGc | H/C | Changed missense |
| USH1C | 11-17542439-TG-CA | cCA/cTG | P/L | Unchanged |
| SAAL1 | 11-18108492-TG-CA | aCA/aTG | T/M | Changed missense |
| MRGPRX3 | 11-18159455-TG-CA | TGg/CAg | W/Q | Rescued nonsense |
| RP11-113D6.6 | 11-18210480-TG-CA | cCA/cTG | P/L | Unchanged |
| MRGPRX1 | 11-18956305-GT-AC | gAC/gGT | D/G | Unchanged |
| WT1 | 11-32417945-TCG-CCA | CgA/TgG | R/W | Rescued nonsense |
| QSER1 | 11-32954344-GT-AC | GTa/ACa | V/T | Changed missense |
| ACCSL | 11-44080210-TG-CA | TGc/CAc | C/H | Changed missense |
| OR5D14 | 11-55563900-TG-CA | cTG/cCA | L/P | Unchanged |
| OR5L2 | 11-55595092-TG-CA | aTG/aCA | M/T | Partially changed missense |
| OR5AK2 | 11-56756663-TG-CA | aTG/aCA | M/T | Partially changed missense |
| SPTBN2 | 11-66481633-GT-AC | aAC/aGT | N/S | Unchanged |
| RHOD | 11-66837965-TG-CA | TGc/CAc | C/H | Changed missense |
| RAD9A | 11-67164789-GGT-AGC | GgT/AgC | G/S | Unchanged |
| FAM86C1 | 11-71504475-TG-CA | gTG/gCA | V/A | Unchanged |
| FAM86C1 | 11-71507186-TG-CA | TGt/CAt | C/H | Changed missense |
| DNAJB13 | 11-73681134-TG-CA | aTG/aCA | M/T | Partially changed missense |
| LRRC32 | 11-76372418-TG-CA | aCA/aTG | T/M | Changed missense |
| TTC12 | 11-113233196-TG-CA | gTG/gCA | V/A | Unchanged |
| TMPRSS5 | 11-113570405-TG-CA | gCA/gTG | A/V | Unchanged |
| MCAM | 11-119181170-TAG-CAA | CtA/TtG | L | Unchanged |
| OR8B3 | 11-124267189-TG-CA | CAt/TGt | H/C | Changed missense |
| AP000708.1 | 11-125366675-TGG-CGA | TgG/CgA | W/R | Rescued nonsense |
| HYLS1 | 11-125769354-TG-CA | TGt/CAt | C/H | Changed missense |
| RPUSD4 | 11-126081403-TG-CA | CAg/TGg | Q/W | Rescued nonsense |
| IQSEC3 | 12-266265-GT-AC | cGT/cAC | R/H | Unchanged |
| AKAP3 | 12-4737042-GT-AC | cAC/cGT | H/R | Unchanged |
| KCNA5 | 12-5154461-GT-AC | gGT/gAC | G/D | Unchanged |
| PLEKHG6 | 12-6421495-GCT-ACC | GcT/AcC | A/T | Unchanged |
| NCAPD2 | 12-6632471-GT-AC | GTg/ACg | V/T | Changed missense |
| TAS2R10 | 12-10978402-GT-AC | ACg/GTg | T/V | Changed missense |
| TAS2R20 | 12-11150319-TG-CA | gCA/gTG | A/V | Unchanged |
| TAS2R43 | 12-11244194-TG-CA | CAt/TGt | H/C | Changed missense |
| WBP11 | 12-14947554-TG-CA | CAg/TGg | Q/W | Rescued nonsense |
| ITPR2 | 12-26809316-GT-AC | cAC/cGT | H/R | Unchanged |
| LRRK2 | 12-40758652-TG-CA | aTG/aCA | M/T | Partially changed missense |
| OR8S1 | 12-48919659-TG-CA | cTG/cCA | L/P | Unchanged |
| OR8S1 | 12-48919793-TG-CA | TGc/CAc | C/H | Changed missense |
| KRT83 | 12-52708419-TG-CA | CAt/TGt | H/C | Changed missense |
| LGR5 | 12-71977787-TG-CA | gTG/gCA | V/A | Unchanged |
| ZFC3H1 | 12-72020103-GT-AC | gAC/gGT | D/G | Unchanged |
| C12orf50 | 12-88380094-TG-CA | CAg/TGg | Q/W | Rescued nonsense |
| TMCC3 | 12-94976084-TG-CA | gCA/gTG | A/V | Unchanged |
| GAS2L3 | 12-101005788-TG-CA | aTG/aCA | M/T | Partially changed missense |
| APPL2 | 12-105568176-GT-AC | gAC/gGT | D/G | Unchanged |
| SH2B3 | 12-111884608-TG-CA | TGg/CAg | W/Q | Rescued nonsense |
| TMEM233 | 12-120067559-GAT-AAC | GaT/AaC | D/N | Unchanged |
| RAB35 | 12-120535169-GT-AC | aAC/aGT | N/S | Unchanged |
| POLE | 12-133208979-TG-CA | tCA/tTG | S/L | Unchanged |
| GOLGA3 | 12-133389998-TG-CA | aCA/aTG | T/M | Changed missense |
| MIPEP | 13-24411770-GCT-ACC | AgC/GgT | S/G | Unchanged |
| LRRC63 | 13-46801793-TG-AC | TGt/ACt | C/T | Changed missense |
| LRRC63 | 13-46801794-GT-CA | tGT/tCA | C/S | Rescued nonsense |
| LMO7 | 13-76397731-GT-AC | GTt/ACt | V/T | Changed missense |
| LMO7 | 13-76423248-TG-CA | aTG/aCA | M/T | Partially changed missense |
| GPC6 | 13-95050781-GT-CA | GTg/CAg | V/Q | Changed missense |
| RNF113B | 13-98829176-TG-CA | cCA/cTG | P/L | Unchanged |
| TMEM255B | 13-114469204-GT-AC | GTt/ACt | V/T | Changed missense |
| SUPT16H | 14-21831052-TG-CA | cCA/cTG | P/L | Unchanged |
| RBM23 | 14-23374435-GAT-AAC | AtC/GtT | I/V | Unchanged |
| MIA2 | 14-39716965-TG-CA | aTG/aCA | M/T | Partially changed missense |
| NID2 | 14-52505517-GT-AC | gAC/gGT | D/G | Unchanged |
| FBXO34 | 14-55818706-TG-CA | cTG/cCA | L/P | Unchanged |
| TMEM260 | 14-57099859-GT-AC | aGT/aAC | S/N | Unchanged |
| KIAA0586 | 14-59010649-TG-CA | cTG/cCA | L/P | Unchanged |
| SYNE2 | 14-64491695-TG-CA | aTG/aCA | M/T | Partially changed missense |
| ADAM21 | 14-70924632-GT-AC | aGT/aAC | S/N | Unchanged |
| ELMSAN1 | 14-74196686-TG-CA | gCA/gTG | A/V | Unchanged |
| NGB | 14-77735616-TG-CA | CAg/TGg | Q/W | Rescued nonsense |
| ADCK1 | 14-78399633-TG-CA | TGg/CAg | W/Q | Rescued nonsense |
| GALC | 14-88411947-TG-CA | aCA/aTG | T/M | Changed missense |
| SERPINA6 | 14-94772429-GT-AC | gAC/gGT | D/G | Unchanged |
| CLMN | 14-95670567-TG-CA | tCA/tTG | S/L | Unchanged |
| SYNE3 | 14-95910933-TG-CA | gCA/gTG | A/V | Unchanged |
| SYNE3 | 14-95918625-TG-CA | cCA/cTG | P/L | Unchanged |
| WDR25 | 14-100847523-TG-CA | TGg/CAg | W/Q | Rescued nonsense |
| HSP90AA1 | 14-102568296-GGT-AGC | AcC/GcT | T/A | Unchanged |
| AHNAK2 | 14-105408315-TG-CA | cCA/cTG | P/L | Unchanged |
| AHNAK2 | 14-105414312-TG-CA | tCA/tTG | S/L | Unchanged |
| AHNAK2 | 14-105416619-GTT-ATC | AaC/GaT | N/D | Unchanged |
| IGHG1 | 14-106207843-TG-CA | aCA/aTG | T/M | Changed missense |
| IGHD1-14 | 14-106366499-GT-AC | ACc/GTc | T/V | Changed missense |
| IGHV3-7 | 14-106518472-GTT-ATC | AaC/GaT | N/D | Unchanged |
| IGHV1-8 | 14-106539268-GT-CA | aAC/aTG | N/M | Changed missense |
| IGHV3-15 | 14-106610520-GTT-ATC | AaC/GaT | N/D | Unchanged |
| IGHV3-23 | 14-106725402-GCT-ACC | AgC/GgT | S/G | Unchanged |
| IGHV1-24 | 14-106733264-TG-CA | aCA/aTG | T/M | Changed missense |
| IGHV4-39 | 14-106877682-GT-AC | aAC/aGT | N/S | Unchanged |
| IGHV1-69 | 14-107170054-TG-CA | aCA/aTG | T/M | Changed missense |
| IGHV2-70 | 14-107178886-GT-AC | aAC/aGT | N/S | Unchanged |
| POTEB2 | 15-21062000-TG-CA | aCA/aTG | T/M | Changed missense |
| GOLGA6L1 | 15-22742549-TG-CA | TGg/CAg | W/Q | Rescued nonsense |
| GOLGA6L2 | 15-23690466-TG-CA | tCA/tTG | S/L | Unchanged |
| NPAP1 | 15-24921468-TG-CA | TGg/CAg | W/Q | Rescued nonsense |
| GOLGA8M | 15-28949058-GT-AC | cAC/cGT | H/R | Unchanged |
| GOLGA8O | 15-32739268-GT-AC | cAC/cGT | H/R | Unchanged |
| PLA2G4F | 15-42434254-GTT-ATC | AaC/GaT | N/D | Unchanged |
| CDAN1 | 15-43023482-TG-CA | CAg/TGg | Q/W | Rescued nonsense |
| MYO5A | 15-52689526-TG-CA | aCA/aTG | T/M | Changed missense |
| FAM214A | 15-52903772-TG-CA | CAg/TGg | Q/W | Rescued nonsense |
| LDHAL6B | 15-59499627-TG-CA | gTG/gCA | V/A | Unchanged |
| MEGF11 | 15-66257408-TG-CA | CAc/TGc | H/C | Changed missense |
| IQCH | 15-67692501-GT-AC | cGT/cAC | R/H | Unchanged |
| ADPGK | 15-73067234-TG-CA | gCA/gTG | A/V | Unchanged |
| GOLGA6C | 15-75556026-TG-CA | aTG/aCA | M/T | Partially changed missense |
| GOLGA6D | 15-75582008-TG-CA | TGg/CAg | W/Q | Rescued nonsense |
| ADAMTS7 | 15-79058695-TG-CA | aCA/aTG | T/M | Changed missense |
| ADAMTS7 | 15-79069864-TG-CA | cCA/cTG | P/L | Unchanged |
| FAM154B | 15-82574879-TG-CA | TGg/CAg | W/Q | Rescued nonsense |
| FAM154B | 15-82574879-TGG-CGA | TgG/CgA | W/R | Rescued nonsense |
| AKAP13 | 15-86122779-TG-CA | TGg/CAg | W/Q | Rescued nonsense |
| CRTC3 | 15-91182001-GT-CA | gGT/gCA | G/A | Unchanged |
| SYNM | 15-99653800-TG-CA | gTG/gCA | V/A | Unchanged |
| WDR90 | 16-705360-TG-CA | gTG/gCA | V/A | Unchanged |
| WDR90 | 16-705844-TTG-CTA | TtG/CtA | L | Unchanged |
| TSC2 | 16-2138267-GAT-AAC | GaT/AaC | D/N | Unchanged |
| ABCA3 | 16-2334817-GAT-AAC | AtC/GtT | I/V | Unchanged |
| ZNF75A | 16-3367229-TG-CA | gTG/gCA | V/A | Unchanged |
| ADCY9 | 16-4165432-TGG-CGA | CcA/TcG | P/S | Unchanged |
| NAGPA | 16-5075633-GT-AC | ACt/GTt | T/V | Changed missense |
| CTD-3088G3.8 | 16-11540712-TG-CA | aCA/aTG | T/M | Changed missense |
| SDR42E2 | 16-22178256-GT-AC | cGT/cAC | R/H | Unchanged |
| GSG1L | 16-27974487-TG-CA | gCA/gTG | A/V | Unchanged |
| APOBR | 16-28508716-TG-CA | gTG/gCA | V/A | Unchanged |
| PRRT2 | 16-29825126-TTG-CTA | TtG/CtA | L | Unchanged |
| LPCAT2 | 16-55562465-TG-CA | aTG/aCA | M/T | Partially changed missense |
| MT4 | 16-56601722-TG-CA | TGg/CAg | W/Q | Rescued nonsense |
| MT1G | 16-56701267-GCT-ACC | AgC/GgT | S/G | Unchanged |
| COG3 | 16-69373414-TG-CA | aCA/aTG | T/M | Changed missense |
| NPIPB15 | 16-74425793-TCG-CCA | TcG/CcA | S/P | Unchanged |
| DNAAF1 | 16-84209738-TG-CA | tTG/tCA | L/S | Unchanged |
| ZCCHC14 | 16-87445363-GT-AC | cAC/cGT | H/R | Unchanged |
| PIEZO1 | 16-88791457-TG-CA | cCA/cTG | P/L | Unchanged |
| FANCA | 16-89866042-GT-AC | ACg/GTg | T/V | Changed missense |
| WDR81 | 17-1630991-TG-CA | cTG/cCA | L/P | Unchanged |
| SMYD4 | 17-1686409-GT-AC | tAC/tGT | Y/C | Unchanged |
| SMG6 | 17-2202943-TG-CA | tCA/tTG | S/L | Unchanged |
| MYBBP1A | 17-4455500-TG-CA | gCA/gTG | A/V | Unchanged |
| GLTPD2 | 17-4693170-TG-CA | gTG/gCA | V/A | Unchanged |
| ENO3 | 17-4856580-TG-CA | gTG/gCA | V/A | Unchanged |
| CAMTA2 | 17-4875566-TG-CA | cCA/cTG | P/L | Unchanged |
| AIPL1 | 17-6330068-TG-CA | cCA/cTG | P/L | Unchanged |
| KIAA0753 | 17-6493198-TG-CA | CAg/TGg | Q/W | Rescued nonsense |
| SLC35G6 | 17-7386279-TG-CA | TGg/CAg | W/Q | Rescued nonsense |
| PFAS | 17-8167600-TG-CA | cTG/cCA | L/P | Unchanged |
| CDRT1 | 17-15492409-TG-CA | gCA/gTG | A/V | Unchanged |
| EPN2 | 17-19232077-GT-AC | GTa/ACa | V/T | Changed missense |
| ULK2 | 17-19729495-TG-CA | gCA/gTG | A/V | Unchanged |
| NOS2 | 17-26115949-TG-CA | cCA/cTG | P/L | Unchanged |
| ABHD15 | 17-27889985-GT-AC | ACc/GTc | T/V | Changed missense |
| UTP6 | 17-30222002-TG-CA | CAg/TGg | Q/W | Rescued nonsense |
| SLFN14 | 17-33884804-TG-CA | CAg/TGg | Q/W | Rescued nonsense |
| LYZL6 | 17-34264862-TG-CA | gCA/gTG | A/V | Unchanged |
| FBXO47 | 17-37101380-TG-CA | CAa/TGa | Q/* | Unchanged |
| KRT28 | 17-38950272-TG-CA | aCA/aTG | T/M | Changed missense |
| KRTAP4-1 | 17-39340910-TG-CA | CAc/TGc | H/C | Changed missense |
| KRT32 | 17-39623363-TG-CA | CAg/TGg | Q/W | Rescued nonsense |
| NT5C3B | 17-39987130-TG-CA | gCA/gTG | A/V | Unchanged |
| MPP2 | 17-41960634-GT-CA | cAC/cTG | H/L | Partially changed missense |
| KIF18B | 17-43003484-TG-CA | gCA/gTG | A/V | Unchanged |
| MTMR4 | 17-56572524-TG-CA | aCA/aTG | T/M | Changed missense |
| C17orf47 | 17-56621359-TG-CA | tCA/tTG | S/L | Unchanged |
| TTYH2 | 17-72233559-GT-AC | GTt/ACt | V/T | Changed missense |
| TMEM104 | 17-72784932-GT-AC | GTg/ACg | V/T | Changed missense |
| QRICH2 | 17-74288262-TG-CA | CAt/TGt | H/C | Changed missense |
| TK1 | 17-76178748-TG-CA | gCA/gTG | A/V | Unchanged |
| DNAH17 | 17-76571086-GAT-AAC | AtC/GtT | I/V | Unchanged |
| C1QTNF1 | 17-77040127-GT-AC | cGT/cAC | R/H | Unchanged |
| AZI1 | 17-79173224-TG-CA | aCA/aTG | T/M | Changed missense |
| NARF | 17-80442721-GT-AC | cGT/cAC | R/H | Unchanged |
| TBCD | 17-80887242-GAT-AAC | GaT/AaC | D/N | Unchanged |
| LAMA1 | 18-6999628-TG-CA | tCA/tTG | S/L | Unchanged |
| PIEZO2 | 18-10763007-TG-CA | aCA/aTG | T/M | Changed missense |
| CEP192 | 18-13056682-GT-AC | GTg/ACg | V/T | Changed missense |
| CEP192 | 18-13095609-TG-CA | cTG/cCA | L/P | Unchanged |
| CTAGE1 | 18-19995753-TG-CA | cCA/cTG | P/L | Unchanged |
| NPC1 | 18-21140432-TG-CA | CAt/TGt | H/C | Changed missense |
| LAMA3 | 18-21413867-GCT-ACC | GcT/AcC | A/T | Unchanged |
| MOCOS | 18-33848581-TG-CA | gTG/gCA | V/A | Unchanged |
| FECH | 18-55221648-TG-CA | cCA/cTG | P/L | Unchanged |
| ALPK2 | 18-56204747-GT-AC | ACc/GTc | T/V | Changed missense |
| SERPINB3 | 18-61322973-TG-CA | CAt/TGt | H/C | Changed missense |
| ZNF516 | 18-74154999-GT-AC | aAC/aGT | N/S | Unchanged |
| LPPR3 | 19-813219-GT-AC | ACg/GTg | T/V | Changed missense |
| AP3D1 | 19-2111741-TGG-CGA | CcA/TcG | P/S | Unchanged |
| CACTIN | 19-3611972-GT-AC | aAC/aGT | N/S | Unchanged |
| TJP3 | 19-3750615-TG-CA | aTG/aCA | M/T | Partially changed missense |
| FSD1 | 19-4306310-GT-AC | cGT/cAC | R/H | Unchanged |
| PLIN4 | 19-4511381-GT-AC | ACc/GTc | T/V | Changed missense |
| ZNRF4 | 19-5455977-GT-AC | GTg/ACg | V/T | Changed missense |
| ZNRF4 | 19-5455978-TG-CA | gTG/gCA | V/A | Unchanged |
| LRRC8E | 19-7963976-TG-CA | aTG/aCA | M/T | Partially changed missense |
| ZNF558 | 19-8922729-TG-CA | CAt/TGt | H/C | Changed missense |
| MBD3L1 | 19-8953799-GTT-ATC | GtT/AtC | V/I | Unchanged |
| MUC16 | 19-9003645-GT-AC | ACt/GTt | T/V | Changed missense |
| MUC16 | 19-9048421-TG-CA | aCA/aTG | T/M | Changed missense |
| MUC16 | 19-9060812-TG-CA | tCA/tTG | S/L | Unchanged |
| MUC16 | 19-9065594-GGT-AGC | AcC/GcT | T/A | Unchanged |
| OR7G2 | 19-9213972-TG-CA | CAg/TGg | Q/W | Rescued nonsense |
| ZNF562 | 19-9764069-TG-CA | gCA/gTG | A/V | Unchanged |
| ZNF812 | 19-9801502-TG-CA | CAt/TGt | H/C | Changed missense |
| RDH8 | 19-10131999-TG-CA | aTG/aCA | M/T | Partially changed missense |
| DNMT1 | 19-10291181-TG-CA | CAt/TGt | H/C | Changed missense |
| ICAM3 | 19-10449512-GAT-AAC | AtC/GtT | I/V | Unchanged |
| ATG4D | 19-10659706-TG-CA | gTG/gCA | V/A | Unchanged |
| PRKCSH | 19-11553279-GCT-ACC | GcT/AcC | A/T | Unchanged |
| DNASE2 | 19-12989560-GCT-ACC | AgC/GgT | S/G | Unchanged |
| C19orf57 | 19-14000170-TG-CA | CAg/TGg | Q/W | Rescued nonsense |
| NOTCH3 | 19-15292437-TG-CA | cCA/cTG | P/L | Unchanged |
| CYP4F3 | 19-15763720-TG-CA | gTG/gCA | V/A | Unchanged |
| IL12RB1 | 19-18186618-TG-CA | CAg/TGg | Q/W | Rescued nonsense |
| COPE | 19-19011244-TG-CA | cCA/cTG | P/L | Unchanged |
| UQCRFS1 | 19-29704002-TG-CA | tCA/tTG | S/L | Unchanged |
| WDR88 | 19-33647379-TG-CA | TGt/CAt | C/H | Changed missense |
| GPR42 | 19-35863028-TG-CA | gTG/gCA | V/A | Unchanged |
| ZNF790 | 19-37310344-TG-CA | CAg/TGg | Q/W | Rescued nonsense |
| ZNF568 | 19-37441365-TG-CA | aTG/aCA | M/T | Partially changed missense |
| ZNF420 | 19-37619613-TTG-CTA | TtG/CtA | L | Unchanged |
| CAPN12 | 19-39226927-TG-CA | CAt/TGt | H/C | Changed missense |
| LGALS14 | 19-40197924-TG-CA | TGt/CAt | C/H | Changed missense |
| FCGBP | 19-40367862-TG-CA | cCA/cTG | P/L | Unchanged |
| FCGBP | 19-40367862-TGG-CGA | CcA/TcG | P/S | Unchanged |
| FCGBP | 19-40408053-TG-CA | cCA/cTG | P/L | Unchanged |
| ADCK4 | 19-41211056-TG-CA | CAc/TGc | H/C | Changed missense |
| CYP2A7 | 19-41384675-TG-CA | CAc/TGc | H/C | Changed missense |
| EXOSC5 | 19-41903220-GT-AC | ACg/GTg | T/V | Changed missense |
| PSG8 | 19-43269704-TG-CA | aCA/aTG | T/M | Changed missense |
| PSG4 | 19-43699424-TG-CA | cCA/cTG | P/L | Unchanged |
| PSG4 | 19-43709659-TG-CA | aCA/aTG | T/M | Changed missense |
| XRCC1 | 19-44055726-TG-CA | CAg/TGg | Q/W | Rescued nonsense |
| SRRM5 | 19-44117598-GT-AC | aGT/aAC | S/N | Unchanged |
| ZNF155 | 19-44500761-GT-AC | cGT/cAC | R/H | Unchanged |
| ZNF235 | 19-44792967-TAG-CAA | CtA/TtG | L | Unchanged |
| SPHK2 | 19-49132360-TG-CA | cTG/cCA | L/P | Unchanged |
| SIGLEC11 | 19-50461664-TG-CA | tCA/tTG | S/L | Unchanged |
| KLK14 | 19-51584951-TG-CA | CAg/TGg | Q/W | Rescued nonsense |
| SIGLEC9 | 19-51628481-TG-CA | TGg/CAg | W/Q | Rescued nonsense |
| ZNF577 | 19-52376119-GT-AC | ACt/GTt | T/V | Changed missense |
| ZNF615 | 19-52497745-TG-CA | CAg/TGg | Q/W | Rescued nonsense |
| ZNF468 | 19-53344426-TG-CA | CAt/TGt | H/C | Changed missense |
| ZNF331 | 19-54080067-TG-CA | TGt/CAt | C/H | Changed missense |
| LILRB3 | 19-54726226-TG-CA | gCA/gTG | A/V | Unchanged |
| LILRB2 | 19-54784130-TG-CA | CAc/TGc | H/C | Changed missense |
| NLRP4 | 19-56369591-GCT-ACC | GcT/AcC | A/T | Unchanged |
| ZSCAN5C | 19-56717604-GGT-AGC | GgT/AgC | G/S | Unchanged |
| ZNF667 | 19-56953863-TG-CA | aCA/aTG | T/M | Changed missense |
| ZNF749 | 19-57956186-TG-CA | gTG/gCA | V/A | Unchanged |
| APOB | 2-21232804-GT-AC | gAC/gGT | D/G | Unchanged |
| ADCY3 | 2-25046090-TG-CA | tCA/tTG | S/L | Unchanged |
| DRC1 | 2-26667615-TG-CA | TGg/CAg | W/Q | Rescued nonsense |
| CIB4 | 2-26804247-TG-CA | CAc/TGc | H/C | Changed missense |
| GCKR | 2-27730940-TG-CA | cTG/cCA | L/P | Unchanged |
| AC074091.13 | 2-27930502-GT-CA | aAC/aTG | N/M | Changed missense |
| PLB1 | 2-28865760-TTG-CTA | TtG/CtA | L | Unchanged |
| FAM179A | 2-29246044-TG-CA | gTG/gCA | V/A | Unchanged |
| LTBP1 | 2-33585796-TG-CA | gTG/gCA | V/A | Unchanged |
| ETAA1 | 2-67630476-TG-CA | aTG/aCA | M/T | Partially changed missense |
| ARHGAP25 | 2-69049941-TG-CA | aTG/aCA | M/T | Partially changed missense |
| REG3A | 2-79385786-TG-CA | aCA/aTG | T/M | Changed missense |
| CTNNA2 | 2-80801344-GTT-ATC | GtT/AtC | V/I | Unchanged |
| IGKV3-7 | 2-89278101-GCT-ACC | AgC/GgT | S/G | Unchanged |
| IGKV1-8 | 2-89292169-GT-AC | ACa/GTa | T/V | Changed missense |
| IGKV3-15 | 2-89384784-GAT-AAC | AtC/GtT | I/V | Unchanged |
| IGKV2D-28 | 2-89999461-GT-AC | aGT/aAC | S/N | Unchanged |
| ASTL | 2-96795857-TG-CA | CAg/TGg | Q/W | Rescued nonsense |
| TBC1D8 | 2-101656725-GT-AC | ACg/GTg | T/V | Changed missense |
| POTEF | 2-130832358-TG-CA | CAt/TGt | H/C | Changed missense |
| SMPD4 | 2-130910452-TG-CA | gCA/gTG | A/V | Unchanged |
| POTEJ | 2-131414431-TG-CA | TGc/CAc | C/H | Changed missense |
| LRP1B | 2-142567910-TG-CA | CAg/TGg | Q/W | Rescued nonsense |
| LY75 | 2-160639970-TG-CA | tCA/tTG | S/L | Unchanged |
| CD302 | 2-160639970-TG-CA | tCA/tTG | S/L | Unchanged |
| LY75-CD302 | 2-160639970-TG-CA | tCA/tTG | S/L | Unchanged |
| LY75 | 2-160711045-GT-CA | gAC/gTG | D/V | Partially changed missense |
| LY75-CD302 | 2-160711045-GT-CA | gAC/gTG | D/V | Partially changed missense |
| ABCB11 | 2-169789016-TG-CA | gCA/gTG | A/V | Unchanged |
| LRP2 | 2-169997051-GAT-AAC | AtC/GtT | I/V | Unchanged |
| TTN | 2-179430997-GT-AC | ACg/GTg | T/V | Changed missense |
| PLCL1 | 2-198950240-GT-AC | GTa/ACa | V/T | Changed missense |
| PIKFYVE | 2-209190330-TG-CA | tTG/tCA | L/S | Unchanged |
| ABCA12 | 2-215865575-TG-CA | cCA/cTG | P/L | Unchanged |
| CHPF | 2-220405321-TG-CA | CAg/TGg | Q/W | Rescued nonsense |
| OBSL1 | 2-220419236-TG-CA | aCA/aTG | T/M | Changed missense |
| IRS1 | 2-227661043-TG-CA | gCA/gTG | A/V | Unchanged |
| KCNJ13 | 2-233633459-TG-CA | aCA/aTG | T/M | Changed missense |
| UGT1A5 | 2-234621780-TG-CA | tTG/tCA | L/S | Unchanged |
| UGT1A5 | 2-234621810-TG-CA | gTG/gCA | V/A | Unchanged |
| SH3BP4 | 2-235950185-GAT-AAC | GaT/AaC | D/N | Unchanged |
| COL6A3 | 2-238243285-GT-AC | cAC/cGT | H/R | Unchanged |
| ESPNL | 2-239039637-TG-CA | gTG/gCA | V/A | Unchanged |
| PASK | 2-242066314-TG-CA | gCA/gTG | A/V | Unchanged |
| SIRPG | 20-1610894-GT-AC | tAC/tGT | Y/C | Unchanged |
| SIRPA | 20-1895796-TG-CA | tTG/tCA | L/S | Unchanged |
| SIRPA | 20-1896059-GT-AC | GTg/ACg | V/T | Changed missense |
| NOP56 | 20-2638579-TG-CA | aTG/aCA | M/T | Partially changed missense |
| PLCB1 | 20-8755241-GCT-ACC | GcT/AcC | A/T | Unchanged |
| CSTL1 | 20-23424613-TG-CA | TGg/CAg | W/Q | Rescued nonsense |
| CST3 | 20-23618395-TAG-CAA | CtA/TtG | L | Unchanged |
| ACSS1 | 20-25011423-TG-CA | gCA/gTG | A/V | Unchanged |
| PYGB | 20-25264812-GAT-AAC | GaT/AaC | D/N | Unchanged |
| ASXL1 | 20-31022959-TG-CA | cTG/cCA | L/P | Unchanged |
| KIAA1755 | 20-36841756-TG-CA | tCA/tTG | S/L | Unchanged |
| PREX1 | 20-47249170-GT-AC | aAC/aGT | N/S | Unchanged |
| TSHZ2 | 20-51870679-GT-AC | GTc/ACc | V/T | Changed missense |
| PCK1 | 20-56139402-GT-AC | gGT/gAC | G/D | Unchanged |
| LAMA5 | 20-60921641-GGT-AGC | AcC/GcT | T/A | Unchanged |
| HELZ2 | 20-62193445-GT-AC | ACg/GTg | T/V | Changed missense |
| GMEB2 | 20-62221610-TAG-CAA | CtA/TtG | L | Unchanged |
| ITSN1 | 21-35260480-GT-AC | cGT/cAC | R/H | Unchanged |
| FKSG68 | 21-37270507-TG-CA | CAg/TGg | Q/W | Rescued nonsense |
| KCNJ6 | 21-39086965-TG-CA | cCA/cTG | P/L | Unchanged |
| PSMG1 | 21-40549466-TG-CA | cCA/cTG | P/L | Unchanged |
| B3GALT5 | 21-41032740-TG-CA | aTG/aCA | M/T | Partially changed missense |
| KRTAP10-1 | 21-45959854-TG-CA | gCA/gTG | A/V | Unchanged |
| KRTAP10-3 | 21-45977994-GT-AC | ACg/GTg | T/V | Changed missense |
| KRTAP10-3 | 21-45978194-TG-CA | tCA/tTG | S/L | Unchanged |
| COL6A1 | 21-47410929-GGT-AGC | GgT/AgC | G/S | Unchanged |
| PCNT | 21-47787001-GT-AC | GTg/ACg | V/T | Changed missense |
| PCNT | 21-47787002-TG-CA | gTG/gCA | V/A | Unchanged |
| POM121L7 | 22-21481404-TG-CA | gCA/gTG | A/V | Unchanged |
| GGT2 | 22-21563319-TG-CA | gCA/gTG | A/V | Unchanged |
| IGLV7-46 | 22-22724394-TG-CA | tTG/tCA | L/S | Unchanged |
| IGLV3-1 | 22-23223435-GAT-AAC | GaT/AaC | D/N | Unchanged |
| ZNF70 | 22-24085990-TAG-CAA | CtA/TtG | L | Unchanged |
| CABIN1 | 22-24459437-GT-AC | tGT/tAC | C/Y | Unchanged |
| MYO18B | 22-26173661-TG-CA | TGg/CAg | W/Q | Rescued nonsense |
| C22orf31 | 22-29456733-TG-CA | tCA/tTG | S/L | Unchanged |
| SEC14L6 | 22-30934816-TG-CA | CAa/TGa | Q/* | Unchanged |
| OSBP2 | 22-31266544-GCT-ACC | GcT/AcC | A/T | Unchanged |
| C22orf23 | 22-38341134-TG-CA | aCA/aTG | T/M | Changed missense |
| APOBEC3F | 22-39448283-TG-CA | TGg/CAg | W/Q | Rescued nonsense |
| PARVB | 22-44489868-TG-CA | gTG/gCA | V/A | Unchanged |
| PRR5- | 22-45255629-GT-AC | cGT/cAC | R/H | Unchanged |
| ARHGAP8 | | | | |
| ARHGAP8 | 22-45255629-GT-AC | cGT/cAC | R/H | Unchanged |
| C22orf26 | 22-46447714-TG-CA | CAg/TGg | Q/W | Rescued nonsense |
| FLJ27365 | 22-46505786-TG-CA | TGg/CAg | W/Q | Rescued nonsense |
| CTA-299D3.8 | 22-48940551-GCT-ACC | AgC/GgT | S/G | Unchanged |
| MLC1 | 22-50515270-TG-CA | tCA/tTG | S/L | Unchanged |
| ATG7 | 3-11596300-GAT-AAC | GaT/AaC | D/N | Unchanged |
| TRANK1 | 3-36898715-GT-AC | ACc/GTc | T/V | Changed missense |
| XYLB | 3-38401838-GT-AC | gGT/gAC | G/D | Unchanged |
| XIRP1 | 3-39229900-TG-CA | CAg/TGg | Q/W | Rescued nonsense |
| KLHL40 | 3-42733468-TG-CA | TGc/CAc | C/H | Changed missense |
| TOPAZ1 | 3-44283672-TG-CA | TGc/CAc | C/H | Changed missense |
| BSN | 3-49693411-TG-CA | cTG/cCA | L/P | Unchanged |
| GMPPB | 3-49760039-TG-CA | CAg/TGg | Q/W | Rescued nonsense |
| CAMKV | 3-49897244-TG-AC | CAg/GTg | Q/V | Changed missense |
| STAB1 | 3-52555956-GT-AC | cGT/cAC | R/H | Unchanged |
| KBTBD8 | 3-67054649-TG-CA | TGt/CAt | C/H | Changed missense |
| EPHA3 | 3-89521693-TG-CA | TGg/CAg | W/Q | Rescued nonsense |
| CBLB | 3-105400420-TG-CA | cCA/cTG | P/L | Unchanged |
| MORC1 | 3-108690220-TG-CA | CAt/TGt | H/C | Changed missense |
| POPDC2 | 3-119367390-TG-CA | tCA/tTG | S/L | Unchanged |
| GOLGB1 | 3-121435621-TTG-CTA | CaA/TaG | Q/* | Unchanged |
| CD86 | 3-121825197-GTT-ATC | GtT/AtC | V/I | Unchanged |
| EFCAB12 | 3-129140489-TG-CA | aCA/aTG | T/M | Changed missense |
| FAIM | 3-138347988-TG-CA | tTG/tCA | L/S | Unchanged |
| HLTF | 3-148759325-TG-CA | gCA/gTG | A/V | Unchanged |
| P2RY13 | 3-151046308-GT-AC | ACg/GTg | T/V | Changed missense |
| IGSF10 | 3-151154666-TG-CA | aCA/aTG | T/M | Changed missense |
| GFM1 | 3-158366900-GT-AC | GTa/ACa | V/T | Changed missense |
| SI | 3-164767022-GT-CA | gAC/gTG | D/V | Partially changed missense |
| NAALADL2 | 3-174951756-TG-CA | aTG/aCA | M/T | Partially changed missense |
| LRRC15 | 3-194081152-GTT-ATC | AaC/GaT | N/D | Unchanged |
| MUC4 | 3-195505662-TGG-CGA | CcA/TcG | P/S | Unchanged |
| MUC4 | 3-195505848-TG-CA | gCA/gTG | A/V | Unchanged |
| MUC4 | 3-195507081-GGT-AGC | AcC/GcT | T/A | Unchanged |
| MUC4 | 3-195507096-TG-CA | gCA/gTG | A/V | Unchanged |
| MUC4 | 3-195507322-GT-AC | ACc/GTc | T/V | Changed missense |
| MUC4 | 3-195510168-TG-CA | gCA/gTG | A/V | Unchanged |
| MUC4 | 3-195510201-GGT-AGC | AcC/GcT | T/A | Unchanged |
| MUC4 | 3-195511512-TG-CA | gCA/gTG | A/V | Unchanged |
| MUC4 | 3-195511560-TG-CA | gCA/gTG | A/V | Unchanged |
| MUC4 | 3-195512187-TG-CA | tCA/tTG | S/L | Unchanged |
| MUC4 | 3-195512328-TG-CA | gCA/gTG | A/V | Unchanged |
| MUC4 | 3-195515385-GGT-AGC | AcC/GcT | T/A | Unchanged |
| MUC4 | 3-195515386-GT-AC | ACc/GTc | T/V | Changed missense |
| MUC4 | 3-195515482-GT-AC | ACc/GTc | T/V | Changed missense |
| HAUS3 | 4-2242083-TTG-ATC | CaA/GaT | Q/D | Changed missense |
| GRK4 | 4-3037213-TG-CA | cTG/cCA | L/P | Unchanged |
| GRK4 | 4-3039150-TG-CA | gTG/gCA | V/A | Unchanged |
| EVC2 | 4-5624669-GT-AC | ACg/GTg | T/V | Changed missense |
| USP17L10 | 4-9213568-GT-AC | GTa/ACa | V/T | Changed missense |
| PPARGC1A | 4-23815924-TG-CA | aCA/aTG | T/M | Changed missense |
| RFC1 | 4-39302029-TG-CA | cCA/cTG | P/L | Unchanged |
| KCTD8 | 4-44176960-TG-CA | aCA/aTG | T/M | Changed missense |
| COMMD8 | 4-47455085-TG-CA | gCA/gTG | A/V | Unchanged |
| NFXL1 | 4-47887536-TG-CA | gCA/gTG | A/V | Unchanged |
| NOA1 | 4-57829649-GT-AC | aAC/aGT | N/S | Unchanged |
| UGT2B28 | 4-70146310-GT-CA | gGT/gCA | G/A | Unchanged |
| UGT2B4 | 4-70355211-TG-CA | aCA/aTG | T/M | Changed missense |
| SMR3A | 4-71232430-TG-CA | TGt/CAt | C/H | Changed missense |
| HSD17B11 | 4-88258483-TG-CA | CAa/TGa | Q/* | Unchanged |
| DSPP | 4-88537403-GAT-AAC | GaT/AaC | D/N | Unchanged |
| SMARCAD1 | 4-95170839-GT-AC | aGT/aAC | S/N | Unchanged |
| TBCK | 4-107168430-TG-AC | CAa/GTa | Q/V | Changed missense |
| ANKRD50 | 4-125590478-TG-CA | cCA/cTG | P/L | Unchanged |
| PLRG1 | 4-155461113-TTG-CTA | CaA/TaG | Q/* | Unchanged |
| PALLD | 4-169433326-TG-CA | aTG/aCA | M/T | Partially changed missense |
| TENM3 | 4-183652173-GAT-AAC | GaT/AaC | D/N | Unchanged |
| SDHA | 5-228312-GAT-AAC | GaT/AaC | D/N | Unchanged |
| CCT5 | 5-10256160-GT-AC | cGT/cAC | R/H | Unchanged |
| DNAH5 | 5-13701525-TG-CA | aCA/aTG | T/M | Changed missense |
| DNAH5 | 5-13865980-TG-CA | aCA/aTG | T/M | Changed missense |
| EGFLAM | 5-38370537-TG-CA | TGg/CAg | W/Q | Rescued nonsense |
| MROH2B | 5-41057374-TG-CA | CAg/TGg | Q/W | Rescued nonsense |
| RP11-45H22.3 | 5-54252345-TG-CA | aCA/aTG | T/M | Changed missense |
| TNPO1 | 5-72183986-TG-CA | gTG/gCA | V/A | Unchanged |
| ARHGEF28 | 5-73072354-TG-CA | TGg/CAg | W/Q | Rescued nonsense |
| ENC1 | 5-73931246-TG-CA | tCA/tTG | S/L | Unchanged |
| HEXB | 5-73981270-TG-CA | tTG/tCA | L/S | Unchanged |
| F2RL1 | 5-76128521-GT-AC | aGT/aAC | S/N | Unchanged |
| PJA2 | 5-108713982-TG-CA | gCA/gTG | A/V | Unchanged |
| IRF1 | 5-131822055-TG-CA | cCA/cTG | P/L | Unchanged |
| WDR55 | 5-140048267-TG-CA | TGt/CAt | C/H | Changed missense |
| PCDHA1 | 5-140166017-GTT-ATC | GtT/AtC | V/I | Unchanged |
| PCDHA3 | 5-140181890-GCT-ACC | GcT/AcC | A/T | Unchanged |
| PCDHA11 | 5-140250252-TTG-CTA | TtG/CtA | L | Unchanged |
| PCDHA13 | 5-140263420-TTG-CTA | TtG/CtA | L | Unchanged |
| PCDHB3 | 5-140481840-GT-AC | cGT/cAC | R/H | Unchanged |
| PCDHB10 | 5-140574355-GCT-ACC | GcT/AcC | A/T | Unchanged |
| PCDHGA11 | 5-140802839-TG-CA | cTG/cCA | L/P | Unchanged |
| SPINK5 | 5-147510865-GT-AC | gGT/gAC | G/D | Unchanged |
| PDGFRB | 5-149495395-TG-CA | cCA/cTG | P/L | Unchanged |
| THG1L | 5-157164962-TG-CA | cTG/cCA | L/P | Unchanged |
| SH3PXD2B | 5-171789779-GCT-ACC | AgC/GgT | S/G | Unchanged |
| AC027309.1 | 5-172036332-TG-CA | aCA/aTG | T/M | Changed missense |
| AC136604.1 | 5-179078989-TG-CA | TGt/CAt | C/H | Changed missense |
| SLC22A23 | 6-3287118-TG-CA | tCA/tTG | S/L | Unchanged |
| MCUR1 | 6-13801614-GT-AC | ACt/GTt | T/V | Changed missense |
| GPLD1 | 6-24437445-GT-AC | ACa/GTa | T/V | Changed missense |
| GNL1 | 6-30515043-TG-CA | gCA/gTG | A/V | Unchanged |
| MUC22 | 6-30993738-TG-CA | aTG/aCA | M/T | Partially changed missense |
| MUC22 | 6-30994878-TG-CA | aTG/aCA | M/T | Partially changed missense |
| HLA-C | 6-31237771-GGT-AGC | AcC/GcT | T/A | Unchanged |
| HLA-B | 6-31324200-GCT-CCA | AgC/TgG | S/W | Changed missense |
| MICA | 6-31380194-TG-CA | TGt/CAt | C/H | Changed missense |
| PRRC2A | 6-31594626-GGT-CGA | GgT/CgA | G/R | Unchanged |
| HSPA1L | 6-31778272-GT-AC | ACg/GTg | T/V | Changed missense |
| NOTCH4 | 6-32188642-TG-CA | cCA/cTG | P/L | Unchanged |
| HLA-DRB5 | 6-32486437-TG-CA | CAg/TGg | Q/W | Rescued nonsense |
| HLA-DRB5 | 6-32489939-TG-CA | CAg/TGg | Q/W | Rescued nonsense |
| HLA-DQB1 | 6-32629129-TG-C A | CAg/TGg | Q/W | Rescued nonsense |
| WDR46 | 6-33256470-GT-AC | ACc/GTc | T/V | Changed missense |
| TAPBP | 6-33272972-GT-AC | ACt/GTt | T/V | Changed missense |
| TCP11 | 6-35086275-TG-CA | CAg/TGg | Q/W | Rescued nonsense |
| DNAH8 | 6-38976712-TG-CA | cTG/cCA | L/P | Unchanged |
| AARS2 | 6-44275009-GAT-AAC | AtC/GtT | I/V | Unchanged |
| SLC25A27 | 6-46623696-GCT-ACC | GcT/AcC | A/T | Unchanged |
| GPR115 | 6-47684573-TG-CA | aTG/aCA | M/T | Partially changed missense |
| GLYATL3 | 6-49479750-TG-CA | aTG/aCA | M/T | Partially changed missense |
| GFRAL | 6-55266625-TCG-CCA | TcG/CcA | S/P | Unchanged |
| BMP5 | 6-55639028-GT-AC | aAC/aGT | N/S | Unchanged |
| RP11-257K9.8 | 6-73935134-TG-AC | aCA/aGT | T/S | Changed missense |
| ZNF292 | 6-87969480-GT-AC | GTa/ACa | V/T | Changed missense |
| FAXC | 6-99771540-TG-CA | aCA/aTG | T/M | Changed missense |
| PPIL6 | 6-109752450-GT-AC | cAC/cGT | H/R | Unchanged |
| SLC22A16 | 6-110778128-TG-CA | CAt/TGt | H/C | Changed missense |
| TMEM200A | 6-130761796-GCT-ACC | GcT/AcC | A/T | Unchanged |
| CTAGE9 | 6-132030028-TG-CA | aCA/aTG | T/M | Changed missense |
| ULBP1 | 6-150290446-TG-CA | aTG/aCA | M/T | Partially changed missense |
| ESR1 | 6-152201874-GT-AC | cGT/cAC | R/H | Unchanged |
| SYNJ2 | 6-158497715-GTT-ATC | GtT/AtC | V/I | Unchanged |
| PLG | 6-161159625-GCT-ACC | GcT/AcC | A/T | Unchanged |
| PDE10A | 6-165895824-TG-CA | tCA/tTG | S/L | Unchanged |
| RPS6KA2 | 6-167271710-GT-AC | ACc/GTc | T/V | Changed missense |
| RP11-514O12.4 | 6-167271710-GT-AC | ACc/GTc | T/V | Changed missense |
| HEATR2 | 7-810218-GT-AC | GTg/ACg | V/T | Changed missense |
| CARD11 | 7-2946461-TCG-CCA | CgA/TgG | R/W | Rescued nonsense |
| STEAP1B | 7-22533235-TG-CA | CAt/TGt | H/C | Changed missense |
| SPDYE1 | 7-44047066-TG-CA | TGc/CAc | C/H | Changed missense |
| MYO1G | 7-45004063-TG-CA | CAg/TGg | Q/W | Rescued nonsense |
| MYO1G | 7-45009723-GT-AC | aAC/aGT | N/S | Unchanged |
| C7orf57 | 7-48086161-TG-CA | aTG/aCA | M/T | Partially changed missense |
| ZNF479 | 7-57188526-TG-CA | CAc/TGc | H/C | Changed missense |
| WBSCR28 | 7-73279482-TG-CA | TGg/CAg | W/Q | Rescued nonsense |
| C7orf63 | 7-89912301-GT-AC | GTg/ACg | V/T | Changed missense |
| MCM7 | 7-99693078-GAT-AAC | AtC/GtT | I/V | Unchanged |
| ZAN | 7-100377082-TG-CA | cTG/cCA | L/P | Unchanged |
| MUC12 | 7-100635940-TG-CA | aTG/aCA | M/T | Partially changed missense |
| MUC17 | 7-100684686-TG-CA | aTG/aCA | M/T | Partially changed missense |
| MYL10 | 7-101256833-TG-CA | gCA/gTG | A/V | Unchanged |
| FBXL13 | 7-102462636-TG-CA | gCA/gTG | A/V | Unchanged |
| NAMPT | 7-105903904-TG-CA | tCA/tTG | S/L | Unchanged |
| SLC13A1 | 7-122809233-GT-AC | aAC/aGT | N/S | Unchanged |
| STRIP2 | 7-129107227-TG-CA | TGc/CAc | C/H | Changed missense |
| PODXL | 7-131190696-TG-CA | gCA/gTG | A/V | Unchanged |
| NUP205 | 7-135269655-TG-CA | aTG/aCA | M/T | Partially changed missense |
| DGKI | 7-137150695-TG-CA | aCA/aTG | T/M | Changed missense |
| SVOPL | 7-138305806-TG-CA | gCA/gTG | A/V | Unchanged |
| KIAA1549 | 7-138596064-GT-AC | tAC/tGT | Y/C | Unchanged |
| TAS2R38 | 7-141672602-GAT-AAC | AtC/GtT | I/V | Unchanged |
| TRPV5 | 7-142625249-TG-CA | aCA/aTG | T/M | Changed missense |
| TAS2R60 | 7-143141474-GT-AC | cGT/cAC | R/H | Unchanged |
| ZNF212 | 7-148947470-TG-CA | aTG/aCA | M/T | Partially changed missense |
| RP1L1 | 8-10469340-GTT-ATC | AaC/GaT | N/D | Unchanged |
| CSGALNACT1 | 8-19316086-GT-AC | cAC/cGT | H/R | Unchanged |
| WRN | 8-31024654-TG-CA | TGt/CAt | C/H | Changed missense |
| ADHFE1 | 8-67380528-TG-CA | TGt/CAt | C/H | Changed missense |
| NBN | 8-90958422-TG-CA | cCA/cTG | P/L | Unchanged |
| KIAA1429 | 8-95504024-TG-CA | CAg/TGg | Q/W | Rescued nonsense |
| KIAA1429 | 8-95531419-TTG-CTA | CaA/TaG | Q/* | Unchanged |
| CCNE2 | 8-95894448-GT-AC | ACt/GTt | T/V | Changed missense |
| SPAG1 | 8-101252680-TG-CA | aTG/aCA | M/T | Partially changed missense |
| TAF2 | 8-120790304-TG-CA | aCA/aTG | T/M | Changed missense |
| TRMT12 | 8-125463250-TGG-CGA | TgG/CgA | W/R | Rescued nonsense |
| COL22A1 | 8-139697478-TG-CA | cCA/cTG | P/L | Unchanged |
| SLC45A4 | 8-142222443-GTT-ATC | AaC/GaT | N/D | Unchanged |
| LYPD2 | 8-143832509-GT-AC | aAC/aGT | N/S | Unchanged |
| RHPN1 | 8-144462313-TG-CA | cTG/cCA | L/P | Unchanged |
| MROH6 | 8-144649625-TCG-CCA | CgA/TgG | R/W | Rescued nonsense |
| DMRT3 | 9-990712-TTG-CTA | TtG/CtA | L | Unchanged |
| MPDZ | 9-13219570-TG-CA | aCA/aTG | T/M | Changed missense |
| IFNA14 | 9-21239650-GTT-ATC | AaC/GaT | N/D | Unchanged |
| PIGO | 9-35091950-GT-CA | ACa/TGa | T/* | Gained nonsense |
| OR13J1 | 9-35870001-TG-CA | CAc/TGc | H/C | Changed missense |
| PAX5 | 9-36840623-GT-AC | tAC/tGT | Y/C | Unchanged |
| ANKRD18A | 9-38575611-TG-CA | aCA/aTG | T/M | Changed missense |
| SMC5 | 9-72897440-TG-CA | TGt/CAt | C/H | Changed missense |
| PRUNE2 | 9-79324179-GT-AC | ACg/GTg | T/V | Changed missense |
| DAPK1 | 9-90322023-GT-AC | aGT/aAC | S/N | Unchanged |
| OR13C5 | 9-107361449-TAG-CAA | CtA/TtG | L | Unchanged |
| AKAP2 | 9-112900199-TG-CA | tTG/tCA | L/S | Unchanged |
| PALM2-AKAP2 | 9-112900199-TG-CA | tTG/tCA | L/S | Unchanged |
| C9orf84 | 9-114490308-TG-CA | CAt/TGt | H/C | Changed missense |
| TNFSF8 | 9-117666499-GT-AC | tAC/tGT | Y/C | Unchanged |
| TNC | 9-117804544-TG-CA | aCA/aTG | T/M | Changed missense |
| TNC | 9-117840328-GT-CA | aAC/aTG | N/M | Changed missense |
| TNC | 9-117848394-TG-CA | CAg/TGg | Q/W | Rescued nonsense |
| ASTN2 | 9-119495697-TG-CA | cCA/cTG | P/L | Unchanged |
| DENND1A | 9-126144758-TG-CA | tCA/tTG | S/L | Unchanged |
| LMX1B | 9-129455585-TCG-ACC | TcG/AcC | S/T | Unchanged |
| TBC1D13 | 9-131565554-TG-CA | gTG/gCA | V/A | Unchanged |
| PRRC2B | 9-134346314-GT-AC | cGT/cAC | R/H | Unchanged |
| PRRC2B | 9-134350647-TG-CA | aTG/aCA | M/T | Partially changed missense |
| OBP2A | 9-138440641-TG-CA | aTG/aCA | M/T | Partially changed missense |
| ABCA2 | 9-139903219-GAT-CAA | AtC/TtG | I/L | Changed missense |
| CSF2RA | X-1419454-TG-CA | gTG/gCA | V/A | Unchanged |
| ASMTL | X-1554649-TG-CA | aCA/aTG | T/M | Changed missense |
| HEPH | X-65382685-TG-CA | gTG/gCA | V/A | Unchanged |
| ABCB7 | X-74284996-TG-CA | gCA/gTG | A/V | Unchanged |
| ZMAT1 | X-101138792-TG-CA | CAg/TGg | Q/W | Rescued nonsense |
| ATP1B4 | X-119500459-TG-CA | gTG/gCA | V/A | Unchanged |
| USP26 | X-132160161-TG-CA | cCA/cTG | P/L | Unchanged |
| FAM122C | X-133941714-GT-AC | aGT/aAC | S/N | Unchanged |
| MAGEC3 | X-140985607-TG-CA | TGt/CAt | C/H | Changed missense |
| MAGEC1 | X-140993674-GTT-CTA | GtT/CtA | V/L | Unchanged |

TABLE K
Specific targetable MNV mutations from the gnomAD database that can
be created with SPACE using Cas9 proteins with NG PAM recognition.

| Gene_name | MNV | MNV_codons | MNV_AAs | MNV_category |
|---|---|---|---|---|
| SAMD11 | 1-877831-TG-CA | TGg/CAg | W/Q | Rescued nonsense |
| NOC2L | 1-888657-GAT-AAC | AtC/GtT | I/V | Unchanged |
| C1orf170 | 1-914874-GCT-ACC | AgC/GgT | S/G | Unchanged |
| C1orf170 | 1-914940-TG-CA | gCA/gTG | A/V | Unchanged |
| CPSF3L | 1-1247494-TG-CA | cCA/cTG | P/L | Unchanged |
| CPSF3L | 1-1248279-GT-CA | gAC/gTG | D/V | Partially changed missense |
| TAS1R3 | 1-1269554-TG-CA | TGc/CAc | C/H | Changed missense |
| DVL1 | 1-1277533-TG-CA | cCA/cTG | P/L | Unchanged |
| MIB2 | 1-1558792-TG-CA | aTG/aCA | M/T | Partially changed missense |
| CDK11A | 1-1636044-GT-AC | tAC/tGT | Y/C | Unchanged |
| PEX10 | 1-2340200-TG-CA | aCA/aTG | T/M | Changed missense |
| PANK4 | 1-2441358-TG-CA | CAg/TGg | Q/W | Rescued nonsense |
| PRDM16 | 1-3328358-TCG-CCA | TcG/CcA | S/P | Unchanged |
| WRAP73 | 1-3548136-TG-CA | gCA/gTG | A/V | Unchanged |
| CCDC27 | 1-3677933-TG-CA | aTG/aCA | M/T | Partially changed missense |
| PER3 | 1-7870047-GT-AC | aGT/aAC | S/N | Unchanged |
| PER3 | 1-7887493-TG-CA | cTG/cCA | L/P | Unchanged |
| UTS2 | 1-7913430-GT-AC | ACg/GTg | T/V | Changed missense |
| GPR157 | 1-9171348-TG-AC | CAc/GTc | H/V | Changed missense |
| PGD | 1-10473200-GAT-AAC | GaT/AaC | D/N | Unchanged |
| C1orf127 | 1-11008695-TG-CA | cCA/cTG | P/L | Unchanged |
| C1orf167 | 1-11836628-TG-CA | TGg/CAg | W/Q | Rescued nonsense |
| C1orf167 | 1-11839998-TG-CA | TGg/CAg | W/Q | Rescued nonsense |
| TNFRSF1B | 1-12252927-GT-AC | GTg/ACg | V/T | Changed missense |
| DHRS3 | 1-12638964-TG-CA | cCA/cTG | P/L | Unchanged |
| AADACL3 | 1-12779558-GAT-AAC | GaT/AaC | D/N | Unchanged |
| PRAMEF11 | 1-12884849-TG-CA | CAt/TGt | H/C | Changed missense |
| PRAMEF10 | 1-12954806-TG-CA | aCA/aTG | T/M | Changed missense |
| PRAMEF10 | 1-12954852-TG-CA | CAc/TGc | H/C | Changed missense |
| PRAMEF6 | 1-13002068-TG-CA | CAt/TGt | H/C | Changed missense |
| PRAMEF26 | 1-13219066-TG-CA | CAc/TGc | H/C | Changed missense |
| PRAMEF13 | 1-13448351-TG-CA | CAc/TGc | H/C | Changed missense |
| CASP9 | 1-15832543-TG-CA | CAg/TGg | Q/W | Rescued nonsense |
| SPEN | 1-16262717-GCT-ACC | GcT/AcC | A/T | Unchanged |
| CLCNKA | 1-16356531-GTT-ATC | GtT/AtC | V/I | Unchanged |
| CLCNKB | 1-16380196-TG-CA | aTG/aCA | M/T | Partially changed missense |
| PADI4 | 1-17657616-TG-CA | gTG/gCA | V/A | Unchanged |
| AC004824.2 | 1-17664280-TG-CA | gCA/gTG | A/V | Unchanged |
| ARHGEF10L | 1-17991052-TG-CA | TGg/CAg | W/Q | Rescued nonsense |
| ARHGEF10L | 1-18023507-GAT-AAC | GaT/AaC | D/N | Unchanged |
| TAS1R2 | 1-19166243-GAT-AAC | AtC/GtT | I/V | Unchanged |
| TAS1R2 | 1-19181391-GAT-AAC | AtC/GtT | I/V | Unchanged |
| ALDH4A1 | 1-19202917-TG-CA | tCA/tTG | S/L | Unchanged |
| AKR7A3 | 1-19609253-GT-AC | ACt/GTt | T/V | Changed missense |
| PLA2G2C | 1-20490518-TG-CA | CAg/TGg | Q/W | Rescued nonsense |
| VWA5B1 | 1-20644156-TG-CA | TGt/CAt | C/H | Changed missense |
| HSPG2 | 1-22149935-TG-CA | tCA/tTG | S/L | Unchanged |
| ID3 | 1-23885497-GT-AC | ACt/GTt | T/V | Changed missense |
| CNR2 | 1-24201919-TTG-CTA | CaA/TaG | Q/* | Unchanged |
| CNR2 | 1-24201920-TG-CA | CAa/TGa | Q/* | Unchanged |
| MYOM3 | 1-24417415-TG-CA | CAa/TGa | Q/* | Unchanged |
| SFN | 1-27189854-GT-CA | GTg/CAg | V/Q | Changed missense |
| C1orf172 | 1-27278573-TG-CA | CAg/TGg | Q/W | Rescued nonsense |
| FAM46B | 1-27332465-GT-AC | cAC/cGT | H/R | Unchanged |
| MAP3K6 | 1-27684006-TG-CA | CAc/TGc | H/C | Changed missense |
| WASF2 | 1-27736478-TG-CA | cCA/cTG | P/L | Unchanged |
| THEMIS2 | 1-28209360-GTT-ATC | GtT/AtC | V/I | Unchanged |
| MECR | 1-29529699-TG-CA | gCA/gTG | A/V | Unchanged |
| COL16A1 | 1-32158374-TG-CA | cCA/cTG | P/L | Unchanged |
| C1orf94 | 1-34677815-TG-CA | aTG/aCA | M/T | Partially changed missense |
| RP11-244H3.4 | 1-35476429-GT-CA | ACa/TGa | T/* | Gained nonsense |
| ZMYM6 | 1-35476429-GT-CA | ACa/TGa | T/* | Gained nonsense |
| HEYL | 1-40098328-TG-CA | CAc/TGc | H/C | Changed missense |
| COL9A2 | 1-40773149-TG-CA | CAg/TGg | Q/W | Rescued nonsense |
| ZFP69B | 1-40923018-TG-CA | TGt/CAt | C/H | Changed missense |
| HIVEP3 | 1-42048745-TG-CA | CAc/TGc | H/C | Changed missense |
| PTPRF | 1-44071220-TG-CA | gTG/gCA | V/A | Unchanged |
| MOB3C | 1-47078637-TG-CA | gCA/gTG | A/V | Unchanged |
| STIL | 1-47726087-TG-CA | CAt/TGt | H/C | Changed missense |
| PGDN | 1-53544597-TG-CA | gTG/gCA | V/A | Unchanged |
| SLC1A7 | 1-53553754-TG-CA | CAg/TGg | Q/W | Rescued nonsense |
| USP24 | 1-55638075-GT-AC | ACt/GTt | T/V | Changed missense |
| KANK4 | 1-62728838-TG-CA | CAc/TGc | H/C | Changed missense |
| KANK4 | 1-62738904-TG-CA | cCA/cTG | P/L | Unchanged |
| KANK4 | 1-62740446-TG-CA | cCA/cTG | P/L | Unchanged |
| EFCAB7 | 1-63991265-GAT-AAC | GaT/AaC | D/N | Unchanged |
| CACHD1 | 1-65113568-TG-CA | aTG/aCA | M/T | Partially changed missense |
| IL23R | 1-67685387-TG-CA | cTG/cCA | L/P | Unchanged |
| DEPDC1 | 1-68960349-TG-CA | gCA/gTG | A/V | Unchanged |
| LRRC53 | 1-74941293-GT-AC | ACt/GTt | T/V | Changed missense |
| SSX2IP | 1-85113203-TG-CA | gCA/gTG | A/V | Unchanged |
| DDAH1 | 1-85816134-TG-CA | gCA/gTG | A/V | Unchanged |
| COL24A1 | 1-86590915-GCT-ACC | AgC/GgT | S/G | Unchanged |
| GBP1 | 1-89525989-GT-AC | ACg/GTg | T/V | Changed missense |
| TGFBR3 | 1-92262874-TG-CA | gCA/gTG | A/V | Unchanged |
| MTF2 | 1-93580580-TG-AC | TGc/ACc | C/T | Changed missense |
| ABCA4 | 1-94473845-TG-CA | cCA/cTG | P/L | Unchanged |
| ABCA4 | 1-94544233-GT-AC | cAC/cGT | H/R | Unchanged |
| ABCA4 | 1-94544234-TG-CA | CAc/TGc | H/C | Changed missense |
| RWDD3 | 1-95709821-TG-CA | gTG/gCA | V/A | Unchanged |
| AKNAD1 | 1-109394564-TG-CA | gCA/gTG | A/V | Unchanged |
| GSTM5 | 1-110256333-GT-AC | GTt/ACt | V/T | Changed missense |
| GSTM5 | 1-110256333-GTT-ATC | GtT/AtC | V/I | Unchanged |
| EPS8L3 | 1-110295772-TG-CA | tCA/tTG | S/L | Unchanged |
| CSF1 | 1-110466466-TG-CA | cTG/cCA | L/P | Unchanged |
| IGSF3 | 1-117156584-TG-CA | CAg/TGg | Q/W | Rescued nonsense |
| SPAG17 | 1-118565952-TG-CA | cCA/cTG | P/L | Unchanged |
| WARS2 | 1-119584949-GT-AC | cAC/cGT | H/R | Unchanged |
| NBPF9 | 1-144811835-TG-CA | cTG/cCA | L/P | Unchanged |
| NBPF14 | 1-148004782-GCT-ACC | AgC/GgT | S/G | Unchanged |
| CTSK | 1-150771703-TG-CA | gCA/gTG | A/V | Unchanged |
| TCHH | 1-152083533-GT-AC | tAC/tGT | Y/C | Unchanged |
| HRNR | 1-152185789-GT-AC | cAC/cGT | H/R | Unchanged |
| HRNR | 1-152191750-TG-CA | tCA/tTG | S/L | Unchanged |
| HRNR | 1-152192978-TG-CA | CAa/TGa | Q/* | Unchanged |
| FLG | 1-152275725-TCG-CCA | CgA/TgG | R/W | Rescued nonsense |
| FLG | 1-152276391-TCG-CCA | CgA/TgG | R/W | Rescued nonsense |
| FLG | 1-152276430-GT-AC | cAC/cGT | H/R | Unchanged |
| FLG | 1-152276827-TG-CA | CAg/TGg | Q/W | Rescued nonsense |
| FLG | 1-152277822-TG-CA | tCA/tTG | S/L | Unchanged |
| FLG | 1-152278335-TCG-CCA | CgA/TgG | R/W | Rescued nonsense |
| FLG | 1-152280372-GT-AC | cAC/cGT | H/R | Unchanged |
| FLG | 1-152282925-GT-CA | cAC/cTG | H/L | Partially changed missense |
| FLG | 1-152285142-TCG-CCA | CgA/TgG | R/W | Rescued nonsense |
| FLG | 1-152285413-TG-CA | CAg/TGg | Q/W | Rescued nonsense |
| FLG | 1-152285512-TG-CA | CAg/TGg | Q/W | Rescued nonsense |
| IVL | 1-152882851-TG-CA | cTG/cCA | L/P | Unchanged |
| SPRR2D | 1-153012764-GT-AC | ACg/GTg | T/V | Changed missense |
| LOR | 1-153233519-GGT-AGC | GgT/AgC | G/S | Unchanged |
| RPS27 | 1-153964086-GT-CA | GTt/CAt | V/H | Changed missense |
| RXFP4 | 1-155912486-TG-CA | tTG/tCA | L/S | Unchanged |
| MEF2D | 1-156450740-GT-AC | aAC/aGT | N/S | Unchanged |
| IQGAP3 | 1-156532977-TTG-CTA | CaA/TaG | Q/* | Unchanged |
| SPTA1 | 1-158582646-TG-CA | gCA/gTG | A/V | Unchanged |
| OR6N1 | 1-158735691-TG-CA | CAg/TGg | Q/W | Rescued nonsense |
| C1orf204 | 1-159824966-TG-AC | CAa/GTa | Q/V | Changed missense |
| ADAMTS4 | 1-161163037-TG-CA | CAg/TGg | Q/W | Rescued nonsense |
| FCGR2C | 1-161565478-TG-CA | cTG/cCA | L/P | Unchanged |
| RXRG | 1-165398115-TG-CA | aCA/aTG | T/M | Changed missense |
| DCAF6 | 1-168013850-TG-CA | gTG/gCA | V/A | Unchanged |
| F5 | 1-169519049-TG-CA | CAa/TGa | Q/* | Unchanged |
| SELP | 1-169566308-GT-AC | aAC/aGT | N/S | Unchanged |
| TNN | 1-175086123-TG-CA | aTG/aCA | M/T | Partially changed missense |
| TNR | 1-175375683-TG-CA | aCA/aTG | T/M | Changed missense |
| ASTN1 | 1-176863867-TG-CA | CAc/TGc | H/C | Changed missense |
| SEC16B | 1-177929987-TG-CA | CAt/TGt | H/C | Changed missense |
| IER5 | 1-181058540-GT-AC | GTa/ACa | V/T | Changed missense |
| RGSL1 | 1-182443462-TTG-CTA | TtG/CtA | L | Unchanged |
| RGS16 | 1-182569625-GT-AC | cAC/cGT | H/R | Unchanged |
| RGS16 | 1-182569626-TG-CA | CAc/TGc | H/C | Changed missense |
| LAMC1 | 1-183094547-TG-CA | cTG/cCA | L/P | Unchanged |
| LAMC1 | 1-183105533-GT-AC | cGT/cAC | R/H | Unchanged |
| EDEM3 | 1-184677464-GAT-AAC | AtC/GtT | I/V | Unchanged |
| RNPEP | 1-201970560-GTT-ATC | GtT/AtC | V/I | Unchanged |
| PTPN7 | 1-202129826-TG-CA | CAg/TGg | Q/W | Rescued nonsense |
| LGR6 | 1-202287205-GT-AC | GTc/ACc | V/T | Changed missense |
| PLXNA2 | 1-208207839-GT-AC | tAC/tGT | Y/C | Unchanged |
| USH2A | 1-215848641-TG-CA | aCA/aTG | T/M | Changed missense |
| OBSCN | 1-228528298-TG-CA | gTG/gCA | V/A | Unchanged |
| TARBP1 | 1-234569192-TG-CA | gCA/gTG | A/V | Unchanged |
| HEATR1 | 1-236721731-TG-CA | gCA/gTG | A/V | Unchanged |
| HEATR1 | 1-236758887-TG-CA | CAt/TGt | H/C | Changed missense |
| CNST | 1-2467 55124-TG-CA | tTG/tCA | L/S | Unchanged |
| OR2W3 | 1-248059150-TG-CA | TGt/CAt | C/H | Changed missense |
| OR2W3 | 1-248059712-TG-CA | aTG/aCA | M/T | Partially changed missense |
| OR2T8 | 1-248084464-TG-CA | TGg/CAg | W/Q | Rescued nonsense |
| OR2L8 | 1-248112626-GT-AC | tGT/tAC | C/Y | Unchanged |
| OR2AK2 | 1-248129240-GT-AC | GTg/ACg | V/T | Changed missense |
| OR2M5 | 1-248308910-TG-CA | aTG/aCA | M/T | Partially changed missense |
| OR2M2 | 1-248343990-TG-CA | TGc/CAc | C/H | Changed missense |
| OR2T33 | 1-248436965-TG-CA | CAc/TGc | H/C | Changed missense |
| OR2T12 | 1-248458729-TG-CA | CAc/TGc | H/C | Changed missense |
| OR2T7 | 1-248604971-TG-CA | aTG/aCA | MT | Partially changed missense |
| OR2T29 | 1-248722722-TG-CA | CAa/TGa | Q/* | Unchanged |
| OR2T11 | 1-248789504-TG-CA | CAg/TGg | Q/W | Rescued nonsense |
| OR2T27 | 1-248813292-TG-CA | aCA/aTG | T/M | Changed missense |
| PITRM1 | 10-3180227-TG-CA | CAa/TGa | Q/* | Unchanged |
| TAF3 | 10-8007560-TG-CA | gTG/gCA | V/A | Unchanged |
| ECHDC3 | 10-11797434-GTT-ATC | GtT/AtC | V/I | Unchanged |
| NUDT5 | 10-12209752-TG-CA | gCA/gTG | A/V | Unchanged |
| DCLRE1C | 10-14974905-TG-CA | CAt/TGt | H/C | Changed missense |
| CUBN | 10-16882518-TG-CA | aCA/aTG | T/M | Changed missense |
| CUBN | 10-17024501-TGG-CGA | CcA/TcG | P/S | Unchanged |
| PLXDC2 | 10-20506418-GT-AC | GTa/ACa | V/T | Changed missense |
| KIAA1462 | 10-30316872-TG-CA | gCA/gTG | A/V | Unchanged |
| KIAA1462 | 10-30336682-TG-CA | cCA/cTG | P/L | Unchanged |
| C10ORF68 | 10-33137551-TG-CA | aTG/aCA | M/T | Partially changed missense |
| ZNF485 | 10-44111805-TG-CA | cTG/cCA | L/P | Unchanged |
| GPRIN2 | 10-47000004-TG-CA | gTG/gCA | V/A | Unchanged |
| FRMPD2 | 10-49380999-TG-CA | tCA/tTG | S/L | Unchanged |
| WDFY4 | 10-50109902-GT-AC | aGT/aAC | S/N | Unchanged |
| LRRC18 | 10-50121784-TG-CA | aCA/aTG | T/M | Changed missense |
| C10orf71 | 10-50533616-GT-AC | gGT/gAC | G/D | Unchanged |
| CHAT | 10-50856652-GT-AC | GTg/ACg | V/T | Changed missense |
| PCDH15 | 10-55996608-TG-CA | cCA/cTG | P/L | Unchanged |
| HKDC1 | 10-71018660-TG-CA | TGg/CAg | W/Q | Rescued nonsense |
| HKDC1 | 10-71018660-TGG-CGA | TgG/CgA | W/R | Rescued nonsense |
| AC022532.1 | 10-72195439-TG-CA | gTG/gCA | V/A | Unchanged |
| NODAL | 10-72195439-TG-CA | CAc/TGc | H/C | Changed missense |
| ADAMTS14 | 10-72500763-TG-CA | cTG/cCA | L/P | Unchanged |
| PLAU | 10-75673101-TG-CA | cTG/cCA | L/P | Unchanged |
| KAT6B | 10-76789077-GT-AC | GTa/ACa | V/T | Changed missense |
| DLG5 | 10-79616605-TG-CA | CAg/TGg | Q/W | Rescued nonsense |
| SFTPA1 | 10-81372092-TG-CA | aTG/aCA | M/T | Partially changed missense |
| NUTM2B | 10-81471741-TG-CA | TGg/CAg | W/Q | Rescued nonsense |
| LRIT1 | 10-85992511-TG-CA | cCA/cTG | P/L | Unchanged |
| PANK1 | 10-91344169-GT-AC | gAC/gGT | D/G | Unchanged |
| KIF20B | 10-91498127-TG-CA | TGt/CAt | C/H | Changed missense |
| CEP55 | 10-95276718-TG-CA | TGt/CAt | C/H | Changed missense |
| CYP2C19 | 10-96534891-TG-CA | gTG/gCA | V/A | Unchanged |
| SORBS1 | 10-97174351-GT-AC | ACg/GTg | T/V | Changed missense |
| HPS1 | 10-100179851-TG-CA | CAg/TGg | Q/W | Rescued nonsense |
| ABCC2 | 10-101563815-GT-AC | GTt/ACt | V/T | Changed missense |
| DNMBP | 10-101645498-TG-CA | cCA/cTG | P/L | Unchanged |
| DPCD | 10-103368654-TG-CA | tTG/tCA | L/S | Unchanged |
| CALHM1 | 10-105218359-TG-CA | gCA/gTG | A/V | Unchanged |
| NRAP | 10-115405615-TG-CA | CAg/TGg | Q/W | Rescued nonsense |
| NRAP | 10-115417289-GT-AC | cAC/cGT | H/R | Unchanged |
| NHLRC2 | 10-115636469-TG-CA | aTG/aCA | M/T | Partially changed missense |
| GFRA1 | 10-117884950-GT-AC | aAC/aGT | N/S | Unchanged |
| SFXN4 | 10-120919246-TG-CA | gCA/gTG | A/V | Unchanged |
| BAG3 | 10-121429633-TG-CA | TGt/CAt | C/H | Changed missense |
| TACC2 | 10-123845322-TG-CA | TGg/CAg | W/Q | Rescued nonsense |
| TACC2 | 10-123970530-TG-CA | gTG/gCA | V/A | Unchanged |
| PLEKHA1 | 10-124183731-GT-AC | cGT/cAC | R/H | Unchanged |
| DMBT1 | 10-124331845-TG-CA | tTG/tCA | L/S | Unchanged |
| DMBT1 | 10-124345741-TG-CA | tTG/tCA | L/S | Unchanged |
| CPXM2 | 10-125506302-TG-CA | CAg/TGg | Q/W | Rescued nonsense |
| CHST15 | 10-125798111-TG-CA | cCA/cTG | P/L | Unchanged |
| C10orf90 | 10-128202435-TG-CA | gCA/gTG | A/V | Unchanged |
| GPR123 | 10-134910553-GT-CA | GTc/CAc | V/H | Changed missense |
| KNDC1 | 10-135012162-TG-CA | cTG/cCA | L/P | Unchanged |
| ADAM8 | 10-135085754-GGT-AGC | AcC/GcT | T/A | Unchanged |
| TUBGCP2 | 10-135098672-GT-AC | tAC/tGT | Y/C | Unchanged |
| DRD4 | 11-640064-GT-AC | gGT/gAC | G/D | Unchanged |
| PIDD | 11-802379-TG-CA | CAa/TGa | Q/* | Unchanged |
| TSPAN4 | 11-862652-TTG-CTA | TtG/CtA | L | Unchanged |
| MUC6 | 11-1026093-TG-CA | cCA/cTG | P/L | Unchanged |
| MUC2 | 11-1081074-TG-CA | gTG/gCA | V/A | Unchanged |
| MUC2 | 11-1083291-GAT-AAC | GaT/AaC | D/N | Unchanged |
| MUC5AC | 11-1161315-TG-CA | gTG/gCA | V/A | Unchanged |
| MUC5B | 11-1264691-TG-CA | aTG/aCA | M/T | Partially changed missense |
| MUC5B | 11-1265936-TG-CA | cTG/cCA | L/P | Unchanged |
| KRTAP5-5 | 11-1651161-TG-CA | TGt/CAt | C/H | Changed missense |
| SYT8 | 11-1857173-TG-CA | TGc/CAc | C/H | Changed missense |
| SYT8 | 11-1857746-GT-AC | cGT/cAC | R/H | Unchanged |
| TRPM5 | 11-2432964-TG-CA | aCA/aTG | T/M | Changed missense |
| ART1 | 11-3681519-TG-CA | cTG/cCA | L/P | Unchanged |
| OR51F1 | 11-4790474-TG-CA | CAc/TGc | H/C | Changed missense |
| OR51G1 | 11-4944892-GGT-CGA | AcC/TcG | T/S | Unchanged |
| OR51B2 | 11-5344772-TG-CA | aCA/aTG | T/M | Changed missense |
| OR51B6 | 11-5373095-TG-CA | TGt/CAt | C/H | Changed missense |
| OR51J1 | 11-5424050-GT-AC | cGT/cAC | R/H | Unchanged |
| OR51I1 | 11-5462085-GT-AC | tAC/tGT | Y/C | Unchanged |
| OR56B1 | 11-5758062-TG-CA | TGc/CAc | C/H | Changed missense |
| OR56A3 | 11-5968728-TG-CA | aTG/aCA | M/T | Partially changed missense |
| OR56A1 | 11-6048056-TG-CA | gCA/gTG | A/V | Unchanged |
| OR56A1 | 11-6048515-TG-CA | cCA/cTG | P/L | Unchanged |
| DNHD1 | 11-6520164-TG-AC | gTG/gAC | V/D | Changed missense |
| DNHD1 | 11-6569896-GT-AC | GTg/ACg | V/T | Changed missense |
| RRP8 | 11-6622714-GT-AC | aAC/aGT | N/S | Unchanged |
| DCHS1 | 11-6655433-GT-AC | cAC/cGT | H/R | Unchanged |
| OR2AG2 | 11-6789862-GCT-ACC | AgC/GgT | S/G | Unchanged |
| OR10A5 | 11-6867355-GCT-ACC | GcT/AcC | A/T | Unchanged |
| CYB5R2 | 11-7687713-GTT-ATC | AaC/GaT | N/D | Unchanged |
| OVCH2 | 11-7712523-GT-AC | ACa/GTa | T/V | Changed missense |
| TRIM66 | 11-8662090-TG-CA | CAt/TGt | H/C | Changed missense |
| TRIM66 | 11-8662516-TG-CA | CAc/TGc | H/C | Changed missense |
| ADM | 11-10327257-GT-CA | GTt/CAt | V/H | Changed missense |
| GALNT18 | 11-11354346-TG-CA | gCA/gTG | A/V | Unchanged |
| KCNJ11 | 11-17408550-TG-CA | tCA/tTG | S/L | Unchanged |
| USH1C | 11-17542439-TG-CA | cCA/cTG | P/L | Unchanged |
| SAAL1 | 11-18108492-TG-CA | aCA/aTG | T/M | Changed missense |
| MRGPRX3 | 11-18159455-TG-CA | TGg/CAg | W/Q | Rescued nonsense |
| MRGPRX3 | 11-18159668-TG-CA | TGg/CAg | W/Q | Rescued nonsense |
| MRGPRX4 | 11-18195173-GTT-ATC | GtT/AtC | V/I | Unchanged |
| RP11-113D6.6 | 11-18210480-TG-CA | cCA/cTG | P/L | Unchanged |
| MRGPRX1 | 11-18956305-GT-AC | gAC/gGT | D/G | Unchanged |
| WT1 | 11-32417945-TCG-CCA | CgA/TgG | R/W | Rescued nonsense |
| QSER1 | 11-32954344-GT-AC | GTa/ACa | V/T | Changed missense |
| ACCSL | 11-44080210-TG-CA | TGc/CAc | C/H | Changed missense |
| ALX4 | 11-44297054-TG-CA | tCA/tTG | S/L | Unchanged |
| FOLH1 | 11-49186273-TG-CA | CAc/TGc | H/C | Changed missense |
| OR5D14 | 11-55563900-TG-CA | cTG/cCA | L/P | Unchanged |
| OR5L2 | 11-55595092-TG-CA | aTG/aCA | M/T | Partially changed missense |
| OR5AK2 | 11-56756663-TG-CA | aTG/aCA | M/T | Partially changed missense |
| PRG2 | 11-57155288-TG-CA | gCA/gTG | A/V | Unchanged |
| OR10Q1 | 11-57996084-GT-AC | aAC/aGT | N/S | Unchanged |
| RAB3IL1 | 11-61672235-TG-CA | aCA/aTG | T/M | Changed missense |
| ASRGL1 | 11-62105546-GT-CA | GTg/CAg | V/Q | Changed missense |
| RARRES3 | 11-63313642-GTT-ATC | GtT/AtC | V/I | Unchanged |
| CCDC88B | 11-64111928-TG-CA | TGg/CAg | W/Q | Rescued nonsense |
| CCDC88B | 11-64111928-TGG-CGA | TgG/CgA | W/R | Rescued nonsense |
| NAALADL1 | 11-64812791-TG-CA | aCA/aTG | T/M | Changed missense |
| EFEMP2 | 11-65635801-GTT-ATC | AaC/GaT | N/D | Unchanged |
| C11orf68 | 11-65685225-TG-CA | CAg/TGg | Q/W | Rescued nonsense |
| SPTBN2 | 11-66481633-GT-AC | aAC/aGT | N/S | Unchanged |
| RHOD | 11-66837965-TG-CA | TGc/CAc | C/H | Changed missense |
| RAD9A | 11-67164789-GGT-AGC | GgT/AgC | G/S | Unchanged |
| ALDH3B2 | 11-67432854-TG-CA | CAc/TGc | H/C | Changed missense |
| TPCN2 | 11-68851414-TG-CA | cTG/cCA | L/P | Unchanged |
| MYEOV | 11-69063393-TG-CA | gTG/gCA | V/A | Unchanged |
| KRTAP5-7 | 11-71238722-TG-CA | TGc/CAc | C/H | Changed missense |
| KRTAP5-8 | 11-71249162-TG-CA | TGt/CAt | C/H | Changed missense |
| KRTAP5-8 | 11-71249183-TG-CA | TGg/CAg | C/H | Changed missense |
| KRTAP5-10 | 11-71276715-TG-CA | TGt/CAt | C/H | Changed missense |
| KRTAP5-10 | 11-71276736-TG-CA | TGt/CAt | C/H | Changed missense |
| KRTAP5-10 | 11-71276946-GGT-AGC | GgT/AgC | G/S | Unchanged |
| KRTAP5-10 | 11-71276973-TG-CA | TGt/CAt | C/H | Changed missense |
| FAM86C1 | 11-71504475-TG-CA | gTG/gCA | V/A | Unchanged |
| FAM86C1 | 11-71507186-TG-CA | TGt/CAt | C/H | Changed missense |
| ARAP1 | 11-72415329-GT-AC | aAC/aGT | N/S | Unchanged |
| ARHGEF17 | 11-73022361-TG-CA | cTG/cCA | L/P | Unchanged |
| DNAJB13 | 11-73681134-TG-CA | aTG/aCA | M/T | Partially changed missense |
| LRRC32 | 11-76372418-TG-CA | aCA/aTG | T/M | Changed missense |
| MYO7A | 11-76853783-TG-CA | tTG/tCA | L/S | Unchanged |
| MMP1 | 11-102666316-TG-CA | gCA/gTG | A/V | Unchanged |
| TTC12 | 11-113233196-TG-CA | gTG/gCA | V/A | Unchanged |
| TMPRSS5 | 11-113570405-TG-CA | gCA/gTG | A/V | Unchanged |
| NXPE2 | 11-114568942-TG-CA | gTG/gCA | V/A | Unchanged |
| HYOU1 | 11-118919206-TG-CA | gCA/gTG | A/V | Unchanged |
| HYOU1 | 11-118925341-GT-AC | aAC/aGT | N/S | Unchanged |
| MCAM | 11-119181170-TAG-CAA | CtA/TtG | L | Unchanged |
| OR10G8 | 11-123900843-TG-CA | TGg/CAg | W/Q | Rescued nonsense |
| OR10G7 | 11-123909181-GT-AC | tAC/tGT | Y/C | Unchanged |
| OR10G7 | 11-123909194-TG-CA | CAg/TGg | Q/W | Rescued nonsense |
| OR8G5 | 11-124135008-TG-CA | TGt/CAt | C/H | Changed missense |
| OR8B3 | 11-124267177-TG-CA | CAg/TGg | Q/W | Rescued nonsense |
| OR8B3 | 11-124267189-TG-CA | CAt/TGt | H/C | Changed missense |
| AP000708.1 | 11-125366675-TGG-CGA | TgG/CgA | W/R | Rescued nonsense |
| HYLS1 | 11-125769354-TG-CA | TGt/CAt | C/H | Changed missense |
| RPUSD4 | 11-126081403-TG-CA | CAg/TGg | Q/W | Rescued nonsense |
| NFRKB | 11-129754668-TG-CA | aCA/aTG | T/M | Changed missense |
| IQSEC3 | 12-266265-GT-AC | cGT/cAC | R/H | Unchanged |
| IQSEC3 | 12-284056-GGT-AGC | GgT/AgC | G/S | Unchanged |
| SLC6A12 | 12-319111-TG-CA | gCA/gTG | A/V | Unchanged |
| AKAP3 | 12-4737042-GT-AC | cAC/cGT | H/R | Unchanged |
| KCNA5 | 12-5154461-GT-AC | gGT/gAC | G/D | Unchanged |
| VWF | 12-6094784-TG-CA | aCA/aTG | T/M | Changed missense |
| VWF | 12-6128441-GGT-AGC | AcC/GcT | T/A | Unchanged |
| VWF | 12-6131958-TG-CA | cCA/cTG | P/L | Unchanged |
| VWF | 12-6143984-TG-CA | CAg/TGg | Q/W | Rescued nonsense |
| PLEKHG6 | 12-6421495-GCT-ACC | GcT/AcC | A/T | Unchanged |
| SCNN1A | 12-6457061-GT-AC | ACc/GTc | T/V | Changed missense |
| NCAPD2 | 12-6632471-GT-AC | GTg/ACg | V/T | Changed missense |
| A2ML1 | 12-9010670-TG-CA | gTG/gCA | V/A | Unchanged |
| KLRC1 | 12-10603669-GT-AC | aAC/aGT | N/S | Unchanged |
| TAS2R10 | 12-10978402-GT-AC | ACg/GTg | T/V | Changed missense |
| TAS2R20 | 12-11150319-TG-CA | gCA/gTG | A/V | Unchanged |
| TAS2R43 | 12-11244194-TG-CA | CAt/TGt | H/C | Changed missense |
| WBP11 | 12-14947554-TG-CA | CAg/TGg | Q/W | Rescued nonsense |
| RERG | 12-15262179-GT-AC | aAC/aGT | N/S | Unchanged |
| SLC15A5 | 12-16377514-TG-CA | gCA/gTG | A/V | Unchanged |
| SLCO1B1 | 12-21331549-TG-CA | gTG/gCA | V/A | Unchanged |
| ITPR2 | 12-26809316-GT-AC | cAC/cGT | H/R | Unchanged |
| TSPAN11 | 12-31135579-TG-CA | gTG/gCA | V/A | Unchanged |
| DDX11 | 12-31256905-TG-CA | TGc/CAc | C/H | Changed missense |
| LRRK2 | 12-40758652-TG-CA | aTG/aCA | M/T | Partially changed missense |
| MUC19 | 12-40821867-GT-AC | GTc/ACc | V/T | Changed missense |
| MUC19 | 12-40838216-TG-CA | gTG/gCA | V/A | Unchanged |
| GXYLT1 | 12-42503467-TG-CA | aCA/aTG | T/M | Changed missense |
| OR8S1 | 12-48919659-TG-CA | cTG/cCA | L/P | Unchanged |
| OR8S1 | 12-48919793-TG-CA | TGc/CAc | C/H | Changed missense |
| KMT2D | 12-49425978-TG-CA | cCA/cTG | P/L | Unchanged |
| KRT83 | 12-52708419-TG-CA | CAt/TGt | H/C | Changed missense |
| KRT77 | 12-53096913-GGT-AGC | AcC/GcT | T/A | Unchanged |
| KRT4 | 12-53205757-TG-CA | CAg/TGg | Q/W | Rescued nonsense |
| ESPL1 | 12-53686703-GT-AC | cGT/cAC | R/H | Unchanged |
| SPRYD4 | 12-56862886-TG-CA | aTG/aCA | M/T | Partially changed missense |
| GPR182 | 12-57390038-TG-CA | TGc/CAc | C/H | Changed missense |
| METTL21B | 12-58174094-GT-CA | GTc/CAc | V/H | Changed missense |
| LRIG3 | 12-59281574-GT-CA | ACt/TGt | T/C | Changed missense |
| WIF1 | 12-65514266-TG-CA | gCA/gTG | A/V | Unchanged |
| MDM1 | 12-68720627-GT-AC | ACt/GTt | T/V | Changed missense |
| LGR5 | 12-71977787-TG-CA | gTG/gCA | V/A | Unchanged |
| ZFC3H1 | 12-72020103-GT-AC | gAC/gGT | D/G | Unchanged |
| C12orf50 | 12-88380094-TG-CA | CAg/TGg | Q/W | Rescued nonsense |
| CEP290 | 12-88505078-TG-CA | tCA/tTG | S/L | Unchanged |
| PLEKHG7 | 12-93150102-TG-CA | aTG/aCA | M/T | Partially changed missense |
| TMCC3 | 12-94976084-TG-CA | gCA/gTG | A/V | Unchanged |
| HAL | 12-96384249-TG-CA | cCA/cTG | P/L | Unchanged |
| ANKS1B | 12-99640557-TG-CA | cCA/cTG | P/L | Unchanged |
| GAS2L3 | 12-101005788-TG-CA | aTG/aCA | M/T | Partially changed missense |
| GNPTAB | 12-102158763-TG-CA | aCA/aTG | T/M | Changed missense |
| APPL2 | 12-105568176-GT-AC | gAC/gGT | D/G | Unchanged |
| SSH1 | 12-109182049-TG-CA | aCA/aTG | T/M | Changed missense |
| SH2B3 | 12-111884608-TG-CA | TGg/CAg | W/Q | Rescued nonsense |
| ATXN2 | 12-112036789-TG-CA | CAg/TGg | Q/W | Rescued nonsense |
| TMEM233 | 12-120067559-GAT-AAC | GaT/AaC | D/N | Unchanged |
| CIT | 12-120189888-TG-CA | aCA/aTG | T/M | Changed missense |
| RAB35 | 12-120535169-GT-AC | aAC/aGT | N/S | Unchanged |
| KDM2B | 12-121880520-GT-AC | gAC/gGT | D/G | Unchanged |
| HPD | 12-122295334-GT-AC | ACg/GTg | T/V | Changed missense |
| TMEM132C | 12-129153986-GT-AC | GTa/ACa | V/T | Changed missense |
| DDX51 | 12-132626668-TG-CA | CAg/TGg | Q/W | Rescued nonsense |
| POLE | 12-133208979-TG-CA | tCA/tTG | S/L | Unchanged |
| GOLGA3 | 12-133389998-TG-CA | aCA/aTG | T/M | Changed missense |
| MIPEP | 13-24411770-GCT-ACC | AgC/GgT | S/G | Unchanged |
| SHISA2 | 13-26620924-GT-AC | aAC/aGT | N/S | Unchanged |
| POSTN | 13-38160959-TG-CA | CAa/TGa | Q/* | Unchanged |
| COG3 | 13-46108853-TG-CA | tTG/tCA | L/S | Unchanged |
| LRRC63 | 13-46801793-TG-AC | TGt/ACt | C/T | Changed missense |
| LRRC63 | 13-46801794-GT-CA | tGT/tCA | C/S | Rescued nonsense |
| MLNR | 13-49795035-GT-AC | GTc/ACc | V/T | Changed missense |
| CAB39L | 13-49951193-TG-CA | cCA/cTG | P/L | Unchanged |
| AL445989.1 | 13-64321057-TG-CA | TGt/CAt | C/H | Changed missense |
| LMO7 | 13-76397731-GT-AC | GTt/ACt | V/T | Changed missense |
| LMO7 | 13-76423248-TG-CA | aTG/aCA | M/T | Partially changed missense |
| GPC6 | 13-95050781-GT-CA | GTg/CAg | V/Q | Changed missense |
| RNF113B | 13-98829176-TG-CA | cCA/cTG | P/L | Unchanged |
| DOCK9 | 13-99452659-GAT-CAA | AtC/TtG | I/L | Changed missense |
| TMTC4 | 13-101287365-TG-CA | gCA/gTG | A/V | Unchanged |
| ARHGEF7 | 13-111870035-GAT-AAC | GaT/AaC | D/N | Unchanged |
| ATP4B | 13-114309226-GT-AC | tAC/tGT | Y/C | Unchanged |
| TMEM255B | 13-114469204-GT-AC | GTt/ACt | V/T | Changed missense |
| OR11H6 | 14-20692643-TG-CA | TGt/CAt | C/H | Changed missense |
| SUPT16H | 14-21831052-TG-CA | cCA/cTG | P/L | Unchanged |
| OR10G2 | 14-22102592-TG-CA | CAc/TGc | H/C | Changed missense |
| OR4E2 | 14-22133648-GT-AC | GTg/ACg | V/T | Changed missense |
| TRAV8-6 | 14-22447168-TG-CA | gTG/gCA | V/A | Unchanged |
| RBM23 | 14-23374435-GAT-AAC | AtC/GtT | I/V | Unchanged |
| ACIN1 | 14-23530622-TG-CA | tCA/tTG | S/L | Unchanged |
| DHRS2 | 14-24114482-GT-AC | GTa/ACa | V/T | Changed missense |
| RABGGTA | 14-24736960-GT-AC | ACg/GTg | T/V | Changed missense |
| SDR39U1 | 14-24909362-TG-CA | CAg/TGg | Q/W | Rescued nonsense |
| MIA2 | 14-39716965-TG-CA | aTG/aCA | M/T | Partially changed missense |
| CTAGE5 | 14-39736679-GT-AC | GTt/ACt | V/T | Changed missense |
| PYGL | 14-51376774-GGT-AGC | AcC/GcT | T/A | Unchanged |
| NID2 | 14-52505517-GT-AC | gAC/gGT | D/G | Unchanged |
| FBXO34 | 14-55818706-TG-CA | cTG/cCA | L/P | Unchanged |
| TMEM260 | 14-57099859-GT-AC | aGT/aAC | S/N | Unchanged |
| KIAA0586 | 14-59010649-TG-CA | cTG/cCA | L/P | Unchanged |
| SYNE2 | 14-64491695-TG-CA | aTG/aCA | M/T | Partially changed missense |
| PLEKHH1 | 14-68053800-GCT-ACC | GcT/AcC | A/T | Unchanged |
| ADAM21 | 14-70924632-GT-AC | aGT/aAC | S/N | Unchanged |
| ADAM21 | 14-70925520-TG-CA | cTG/cCA | L/P | Unchanged |
| ELMSAN1 | 14-74196686-TG-CA | gCA/gTG | A/V | Unchanged |
| FLVCR2 | 14-76045857-TG-CA | gTG/gCA | V/A | Unchanged |
| C14orf166B | 14-77332408-TG-CA | gTG/gCA | V/A | Unchanged |
| NGB | 14-77735616-TG-CA | CAg/TGg | Q/W | Rescued nonsense |
| ADCK1 | 14-78399633-TG-CA | TGg/CAg | W/Q | Rescued nonsense |
| GALC | 14-88411947-TG-CA | aCA/aTG | T/M | Changed missense |
| SERPINA6 | 14-94772429-GT-AC | gAC/gGT | D/G | Unchanged |
| CLMN | 14-95670567-TG-CA | tCA/tTG | S/L | Unchanged |
| SYNE3 | 14-95910933-TG-CA | gCA/gTG | A/V | Unchanged |
| SYNE3 | 14-95912426-TG-CA | gCA/gTG | A/V | Unchanged |
| SYNE3 | 14-95918625-TG-CA | cCA/cTG | P/L | Unchanged |
| ATG2B | 14-96797724-GT-AC | cAC/cGT | H/R | Unchanged |
| WDR25 | 14-100847523-TG-CA | TGg/CAg | W/Q | Rescued nonsense |
| HSP90AA1 | 14-102568296-GGT-AGC | AcC/GcT | T/A | Unchanged |
| AHNAK2 | 14-105408315-TG-CA | cCA/cTG | P/L | Unchanged |
| AHNAK2 | 14-105413979-TG-CA | aCA/aTG | T/M | Changed missense |
| AHNAK2 | 14-105414132-TG-CA | cCA/cTG | P/L | Unchanged |
| AHNAK2 | 14-105414312-TG-CA | tCA/tTG | S/L | Unchanged |
| AHNAK2 | 14-105415353-GT-AC | gAC/gGT | D/G | Unchanged |
| AHNAK2 | 14-105415482-GT-AC | gAC/gGT | D/G | Unchanged |
| AHNAK2 | 14-105415959-TG-CA | aCA/aTG | T/M | Changed missense |
| AHNAK2 | 14-105416010-TG-CA | aCA/aTG | T/M | Changed missense |
| AHNAK2 | 14-105416154-TG-CA | gCA/gTG | A/V | Unchanged |
| AHNAK2 | 14-105416619-GTT-ATC | AaC/GaT | N/D | Unchanged |
| AHNAK2 | 14-105416787-TG-CA | tCA/tTG | S/L | Unchanged |
| AHNAK2 | 14-105416790-TG-CA | cCA/cTG | P/L | Unchanged |
| AHNAK2 | 14-105416872-TG-CA | CAg/TGg | Q/W | Rescued nonsense |
| AHNAK2 | 14-105416949-TG-CA | aCA/aTG | T/M | Changed missense |
| AHNAK2 | 14-105417102-TG-CA | cCA/cTG | P/L | Unchanged |
| AHNAK2 | 14-105417243-TG-CA | tCA/tTG | S/L | Unchanged |
| AHNAK2 | 14-105417444-TG-CA | aCA/aTG | T/M | Changed missense |
| AHNAK2 | 14-105417597-TG-CA | cCA/cTG | P/L | Unchanged |
| AHNAK2 | 14-105417862-TG-CA | CAg/TGg | Q/W | Rescued nonsense |
| AHNAK2 | 14-105418275-TG-CA | cCA/cTG | P/L | Unchanged |
| AHNAK2 | 14-105419424-TG-CA | aCA/aTG | T/M | Changed missense |
| AHNAK2 | 14-105419739-TG-CA | cCA/cTG | P/L | Unchanged |
| CDCA4 | 14-105477613-TG-CA | cCA/cTG | P/L | Unchanged |
| IGHE | 14-106066454-TG-CA | gCA/gTG | A/V | Unchanged |
| IGHG2 | 14-106110108-TG-CA | cCA/cTG | P/L | Unchanged |
| IGHG1 | 14-106207843-TG-CA | aCA/aTG | T/M | Changed missense |
| IGHG1 | 14-106209340-TG-CA | gCA/gTG | A/V | Unchanged |
| IGHG3 | 14-106237691-GT-AC | ACc/GTc | T/V | Changed missense |
| IGHM | 14-106322042-GT-AC | aAC/aGT | N/S | Unchanged |
| IGHJ5 | 14-106330035-GT-AC | ACc/GTc | T/V | Changed missense |
| IGHD1-14 | 14-106366499-GT-AC | ACc/GTc | T/V | Changed missense |
| IGHV1-2 | 14-106452734-GCT-ACC | AgC/GgT | S/G | Unchanged |
| IGHV3-7 | 14-106518472-GTT-ATC | AaC/GaT | N/D | Unchanged |
| IGHV1-8 | 14-106539268-GT-CA | aAC/aTG | N/M | Changed missense |
| IGHV3-15 | 14-106610344-GT-AC | ACg/GTc | T/V | Changed missense |
| IGHV3-15 | 14-106610520-GTT-ATC | AaC/GaT | N/D | Unchanged |
| IGHV1-18 | 14-106641680-GT-AC | aAC/aGT | N/S | Unchanged |
| IGHV3-23 | 14-106725402-GCT-ACC | AgC/GgT | S/G | Unchanged |
| IGHV1-24 | 14-106733264-TG-CA | aCA/aTG | T/M | Changed missense |
| IGHV2-26 | 14-106758084-TG-CA | aCA/aTG | T/M | Changed missense |
| IGHV4-39 | 14-106877682-GT-AC | aAC/aGT | N/S | Unchanged |
| IGHV3-49 | 14-107013058-TG-CA | aCA/aTG | T/M | Changed missense |
| IGHV4-61 | 14-107095294-TGG-AGC | CcA/GcT | P/A | Unchanged |
| IGHV1-69 | 14-107170054-TG-CA | aCA/aTG | T/M | Changed missense |
| IGHV2-70 | 14-107178886-GT-AC | aAC/aGT | N/S | Unchanged |
| IGHV3OR15-7 | 15-20192950-GT-AC | aAC/aGT | N/S | Unchanged |
| GOLGA6L6 | 15-20739885-TG-CA | CAg/TGg | Q/W | Rescued nonsense |
| POTEB2 | 15-21062000-TG-CA | aCA/aTG | T/M | Changed missense |
| GOLGA6L1 | 15-22742549-TG-CA | TGg/CAg | W/Q | Rescued nonsense |
| NIPA1 | 15-23052632-TG-CA | aCA/aTG | T/M | Changed missense |
| GOLGA8S | 15-23608316-GT-AC | cGT/cAC | R/H | Unchanged |
| GOLGA8S | 15-23610192-GT-AC | GTg/ACg | V/T | Changed missense |
| GOLGA6L2 | 15-23685252-TG-CA | gCA/gTG | A/V | Unchanged |
| GOLGA6L2 | 15-23690466-TG-CA | tCA/tTG | S/L | Unchanged |
| NPAP1 | 15-24921468-TG-CA | TGg/CAg | W/Q | Rescued nonsense |
| GABRA5 | 15-27182355-GTT-ATC | GtT/AtC | V/I | Unchanged |
| HERC2 | 15-28414665-TG-CA | tCA/tTG | S/L | Unchanged |
| HERC2 | 15-28419695-TG-CA | aCA/aTG | T/M | Changed missense |
| HERC2 | 15-28458960-TG-CA | cCA/cTG | P/L | Unchanged |
| GOLGA8M | 15-28949058-GT-AC | cAC/cGT | H/R | Unchanged |
| GOLGA8M | 15-28950750-TG-CA | CAg/TGg | Q/W | Rescued nonsense |
| APBA2 | 15-29347019-TG-CA | cTG/cCA | L/P | Unchanged |
| GOLGA8H | 15-30900873-TG-CA | TGc/CAc | C/H | Changed missense |
| GOLGA8O | 15-32739268-GT-AC | cAC/cGT | H/R | Unchanged |
| AVEN | 15-34159986-TG-CA | CAg/TGg | Q/W | Rescued nonsense |
| RPAP1 | 15-41821752-TCG-CCA | CgA/TgG | R/W | Rescued nonsense |
| SPTBN5 | 15-42178155-TG-CA | CAc/TGc | H/C | Changed missense |
| PLA2G4F | 15-42434254-GTT-ATC | AaC/GaT | N/D | Unchanged |
| CDAN1 | 15-43023482-TG-CA | CAg/TGg | Q/W | Rescued nonsense |
| MAP1A | 15-43817404-GAT-AAC | GaT/AaC | D/N | Unchanged |
| DUOX1 | 15-45444133-TG-CA | TGt/CAt | C/H | Changed missense |
| AP4E1 | 15-51217361-TG-CA | TGc/CAc | C/H | Changed missense |
| MYO5A | 15-52689526-TG-CA | aCA/aTG | T/M | Changed missense |
| FAM214A | 15-52903772-TG-CA | CAg/TGg | Q/W | Rescued nonsense |
| ADAM10 | 15-58971390-TG-CA | cCA/cTG | P/L | Unchanged |
| MYO1E | 15-59453384-TG-CA | gCA/gTG | A/V | Unchanged |
| LDHAL6B | 15-59499627-TG-CA | gTG/gCA | V/A | Unchanged |
| CILP | 15-65489688-TG-CA | CAg/TGg | Q/W | Rescued nonsense |
| IGDCC4 | 15-65676617-TG-CA | cCA/cTG | P/L | Unchanged |
| IGDCC4 | 15-65676617-TGG-CGA | CcA/TcG | P/S | Unchanged |
| MEGF11 | 15-66257408-TG-CA | CAc/TGc | H/C | Changed missense |
| IQCH | 15-67692501-GT-AC | cGT/cAC | R/H | Unchanged |
| SKOR1 | 15-68114498-TG-CA | cTG/cCA | L/P | Unchanged |
| ITGA11 | 15-68649587-GT-AC | aAC/aGT | N/S | Unchanged |
| ADPGK | 15-73067234-TG-CA | gCA/gTG | A/V | Unchanged |
| HCN4 | 15-73614834-TG-CA | cCA/cTG | P/L | Unchanged |
| C15orf39 | 15-75503147-GT-AC | gGT/gAC | G/D | Unchanged |
| GOLGA6C | 15-75556026-TG-CA | aTG/aCA | M/T | Partially changed missense |
| GOLGA6D | 15-75582008-TG-CA | TGg/CAg | W/Q | Rescued nonsense |
| CSPG4 | 15-75982185-TG-CA | cCA/cTG | P/L | Unchanged |
| ADAMTS7 | 15-79058695-TG-CA | aCA/aTG | T/M | Changed missense |
| ADAMTS7 | 15-79058951-TG-CA | CAt/TGt | H/C | Changed missense |
| ADAMTS7 | 15-79059182-TG-CA | CAc/TGc | H/C | Changed missense |
| ADAMTS7 | 15-79068536-TG-CA | CAg/TGg | Q/W | Rescued nonsense |
| ADAMTS7 | 15-79069864-TG-CA | cCA/cTG | P/L | Unchanged |
| ST20 | 15-80191342-TG-CA | cCA/cTG | P/L | Unchanged |
| FAM154B | 15-82574879-TG-CA | TGg/CAg | W/Q | Rescued nonsense |
| FAM154B | 15-82574879-TGG-CGA | TgG/CgA | W/R | Rescued nonsense |
| GOLGA6L10 | 15-82637334-TG-CA | CAt/TGt | H/C | Changed missense |
| GOLGA6L10 | 15-82637439-TG-CA | CAt/TGt | H/C | Changed missense |
| GOLGA6L18 | 15-82934933-TG-CA | CAt/TGt | H/C | Changed missense |
| GOLGA6L18 | 15-82934954-TG-CA | CAt/TGt | H/C | Changed missense |
| ADAMTSL3 | 15-84581903-GT-AC | cGT/cAC | R/H | Unchanged |
| WDR73 | 15-85188994-TG-CA | tCA/tTG | S/L | Unchanged |
| AKAP13 | 15-86122779-TG-CA | TGg/CAg | W/Q | Rescued nonsense |
| AKAP13 | 15-86124946-TG-CA | aTG/aCA | M/T | Partially changed missense |
| ACAN | 15-89392743-GCT-ACC | GcT/AcC | A/T | Unchanged |
| GDPGP1 | 15-90784250-TG-CA | aTG/aCA | M/T | Partially changed missense |
| CRTC3 | 15-91182001-GT-CA | gGT/gCA | G/A | Unchanged |
| SYNM | 15-99653800-TG-CA | gTG/gCA | V/A | Unchanged |
| CTD-2054N24.2 | 15-100348476-TG-CA | cTG/cCA | L/P | Unchanged |
| CERS3 | 15-100943044-GT-AC | gAC/gGT | D/G | Unchanged |
| TM2D3 | 15-102187076-GTT-ATC | AaC/GaT | N/D | Unchanged |
| RHBDF1 | 16-108585-TG-CA | tCA/tTG | S/L | Unchanged |
| PIGQ | 16-633125-TG-CA | TGt/CAt | C/H | Changed missense |
| PIGQ | 16-633353-TG-CA | TGt/CAt | C/H | Changed missense |
| WDR90 | 16-705360-TG-CA | gTG/gCA | V/A | Unchanged |
| WDR90 | 16-705844-TTG-CTA | TtG/CtA | L | Unchanged |
| WDR90 | 16-716273-TG-CA | TGc/CAc | C/H | Changed missense |
| CACNA1H | 16-1268540-TCG-CCA | TcG/CcA | S/P | Unchanged |
| TPSG1 | 16-1271938-TG-CA | tCA/tTG | S/L | Unchanged |
| TPSD1 | 16-1306354-GT-AC | GTg/ACg | V/T | Changed missense |
| TPSD1 | 16-1306355-TG-CA | gTG/gCA | V/A | Unchanged |
| SPSB3 | 16-1827836-TG-CA | tCA/tTG | S/L | Unchanged |
| ZNF598 | 16-2048704-TG-CA | CAg/TGg | Q/W | Rescued nonsense |
| ZNF598 | 16-2049849-TG-CA | aCA/aTG | T/M | Changed missense |
| TSC2 | 16-2138267-GAT-AAC | GaT/AaC | D/N | Unchanged |
| ABCA3 | 16-2334817-GAT-AAC | AtC/GtT | I/V | Unchanged |
| ZNF75A | 16-3367229-TG-CA | gTG/gCA | V/A | Unchanged |
| SLX4 | 16-3650991-TG-CA | cCA/cTG | P/L | Unchanged |
| ADCY9 | 16-4165432-TGG-CGA | CcA/TgG | P/S | Unchanged |
| NAGPA | 16-5075633-GT-AC | ACt/GTt | T/V | Changed missense |
| TEKT5 | 16-10769958-TG-CA | CAg/TGg | Q/W | Rescued nonsense |
| CTD-3088G3.8 | 16-11540712-TG-CA | aCA/aTG | T/M | Changed missense |
| ERCC4 | 16-14014069-TG-CA | cTG/cCA | L/P | Unchanged |
| SMG1 | 16-18839362-TG-CA | gCA/gTG | A/V | Unchanged |
| ACSM2B | 16-20570659-GAT-AAC | AtC/GtT | I/V | Unchanged |
| DNAH3 | 16-20963765-GGT-CGA | AcC/TcG | T/S | Unchanged |
| SDR42E2 | 16-22178256-GT-AC | cGT/cAC | R/H | Unchanged |
| PALB2 | 16-23646191-TG-CA | CAa/TGa | Q/* | Unchanged |
| ZKSCAN2 | 16-25263336-GT-CA | cAC/cTG | H/L | Partially changed missense |
| IL21R | 16-27460008-GT-CA | GTg/CAg | V/Q | Changed missense |
| GSG1L | 16-27974487-TG-CA | gCA/gTG | A/V | Unchanged |
| APOBR | 16-28508716-TG-CA | gTG/gCA | V/A | Unchanged |
| PRRT2 | 16-29825126-TTG-CTA | TtG/CtA | L | Unchanged |
| SEZ6L2 | 16-29883777-TAG-CAA | CtA/TtG | L | Unchanged |
| HSD3B7 | 16-30999461-GT-AC | cGT/cAC | R/H | Unchanged |
| ABCC11 | 16-48201432-TG-CA | CAc/TGc | H/C | Changed missense |
| SIAH1 | 16-48399356-GT-AC | tAC/tGT | Y/C | Unchanged |
| LPCAT2 | 16-55562465-TG-CA | aTG/aCA | M/T | Partially changed missense |
| CES5A | 16-55883618-TG-CA | cCA/cTG | P/L | Unchanged |
| MT4 | 16-56601722-TG-CA | TGg/CAg | W/Q | Rescued nonsense |
| MT1G | 16-56701267-GCT-ACC | AgC/GgT | S/G | Unchanged |
| SLC12A3 | 16-56904140-TG-CA | cTG/cCA | L/P | Unchanged |
| NLRC5 | 16-57060353-TG-CA | TGc/CAc | C/H | Changed missense |
| MMP15 | 16-58079216-GT-CA | GTg/CAg | V/Q | Changed missense |
| CCDC79 | 16-66792714-TG-CA | CAa/TGa | Q/* | Unchanged |
| E2F4 | 16-67228632-TG-CA | gTG/gCA | V/A | Unchanged |
| FHOD1 | 16-67266065-TG-CA | aCA/aTG | T/M | Changed missense |
| FAM65A | 16-67563735-TGG-CGA | TgG/CgA | W/R | Rescued nonsense |
| CTRL | 16-67964203-TG-CA | CAt/TGt | H/C | Changed missense |
| CDH1 | 16-68857439-GCT-ACC | GcT/AcC | A/T | Unchanged |
| COG8 | 16-69373414-TG-CA | aCA/aTG | T/M | Changed missense |
| CLEC18A | 16-69988319-TG-CA | cTG/cCA | L/P | Unchanged |
| CLEC18A | 16-69988372-GT-AC | GTg/ACg | V/T | Changed missense |
| CLEC18A | 16-69988373-TG-CA | gTG/gCA | V/A | Unchanged |
| NPIPB15 | 16-74425793-TCG-CCA | TcG/CcA | S/P | Unchanged |
| PLCG2 | 16-81819766-GCT-ACC | GcT/AcC | A/T | Unchanged |
| DNAAF1 | 16-84209738-TG-CA | tTG/tCA | L/S | Unchanged |
| TAF1C | 16-84215390-TG-CA | gCA/gTG | A/V | Unchanged |
| ZCCHC14 | 16-87445363-GT-AC | cAC/cGT | H/R | Unchanged |
| KLHDC4 | 16-87788864-GT-AC | ACc/GTc | T/V | Changed missense |
| PIEZO1 | 16-88783098-GAT-AAC | AtC/GtT | I/V | Unchanged |
| PIEZO1 | 16-88791457-TG-CA | cCA/cTG | P/L | Unchanged |
| PIEZO1 | 16-88807895-TG-CA | cCA/cTG | P/L | Unchanged |
| ACSF3 | 16-89167402-GAT-AAC | GaT/AaC | D/N | Unchanged |
| CDH15 | 16-89246668-GAT-AAC | GaT/AaC | D/N | Unchanged |
| ZNF276 | 16-89789898-TGG-CGA | TgG/CgA | W/R | Rescued nonsense |
| FANCA | 16-89866042-GT-AC | ACg/GTg | T/V | Changed missense |
| MYO1C | 17-1373518-TG-CA | CAg/TGg | Q/W | Rescued nonsense |
| WDR81 | 17-1630991-TG-CA | cTG/cCA | L/P | Unchanged |
| SMYD4 | 17-1686409-GT-AC | tAC/tGT | Y/C | Unchanged |
| SMG6 | 17-2202943-TG-CA | tCA/tTG | S/L | Unchanged |
| MNT | 17-2298615-TG-CA | cCA/cTG | P/L | Unchanged |
| ITGAE | 17-3657173-GAT-AAC | AtC/GtT | I/V | Unchanged |
| ZZEF1 | 17-3912208-GT-AC | ACg/GTg | T/V | Changed missense |
| ZZEF1 | 17-3953083-TG-CA | cCA/cTG | P/L | Unchanged |
| MYBBP1A | 17-4455500-TG-CA | gCA/gTG | A/V | Unchanged |
| CXCL16 | 17-4638484-TG-CA | cCA/cTG | P/L | Unchanged |
| GLTPD2 | 17-4693170-TG-CA | gTG/gCA | V/A | Unchanged |
| ENO3 | 17-4856580-TG-CA | gTG/gCA | V/A | Unchanged |
| CAMTA2 | 17-4875566-TG-CA | cCA/cTG | P/L | Unchanged |
| USP6 | 17-5042894-TG-CA | TGg/CAg | W/Q | Rescued nonsense |
| USP6 | 17-5042894-TGG-CGA | TgG/CgA | W/R | Rescued nonsense |
| RABEP1 | 17-5280439-GT-AC | cGT/cAC | R/H | Unchanged |
| AIPL1 | 17-6330068-TG-CA | cCA/cTG | P/L | Unchanged |
| AIPL1 | 17-6331803-TAG-CAA | CtA/TtG | L | Unchanged |
| KIAA0753 | 17-6493198-TG-CA | CAg/TGg | Q/W | Rescued nonsense |
| TEKT1 | 17-6733672-TG-CA | cCA/cTG | P/L | Unchanged |
| TEKT1 | 17-6733672-TGG-CGA | CcA/TcG | P/S | Unchanged |
| CLEC10A | 17-6979444-GT-CA | ACg/TGg | T/W | Changed missense |
| SLC35G6 | 17-7386279-TG-CA | TGg/CAg | W/Q | Rescued nonsense |
| KDM6B | 17-7750219-TG-CA | cTG/cCA | L/P | Unchanged |
| PER1 | 17-8048169-TG-CA | aCA/aTG | T/M | Changed missense |
| PFAS | 17-8167600-TG-CA | cTG/cCA | L/P | Unchanged |
| MYH13 | 17-10206595-TG-CA | CAc/TGc | H/C | Changed missense |
| MYH3 | 17-10543463-TG-CA | gCA/gTG | A/V | Unchanged |
| CDRT1 | 17-15492409-TG-CA | gCA/gTG | A/V | Unchanged |
| CDRT1 | 17-15510986-GTT-ATC | AaC/GaT | N/D | Unchanged |
| RP11-385D13.1 | 17-15510986-GTT-ATC | AaC/GaT | N/D | Unchanged |
| MYO15A | 17-18046898-TG-CA | TGc/CAc | C/H | Changed missense |
| EPN2 | 17-19232077-GT-AC | GTa/ACa | V/T | Changed missense |
| ULK2 | 17-19729495-TG-CA | gCA/gTG | A/V | Unchanged |
| NOS2 | 17-26115949-TG-CA | cCA/cTG | P/L | Unchanged |
| SEZ6 | 17-27286850-GT-AC | ACa/GTa | T/V | Changed missense |
| ABHD15 | 17-27889985-GT-AC | ACc/GTc | T/V | Changed missense |
| EVI2A | 17-29645505-TG-CA | CAg/TGg | Q/W | Rescued nonsense |
| CTD-2370N5.3 | 17-29645505-TG-CA | CAg/TGg | Q/W | Rescued nonsense |
| UTP6 | 17-30222002-TG-CA | CAg/TGg | Q/W | Rescued nonsense |
| SLFN11 | 17-33679633-TG-CA | gCA/gTG | A/V | Unchanged |
| SLFN14 | 17-33884804-TG-CA | CAg/TGg | Q/W | Rescued nonsense |
| LYZL6 | 17-34264862-TG-CA | gCA/gTG | A/V | Unchanged |
| FBXO47 | 17-37101380-TG-CA | CAa/TGa | Q/* | Unchanged |
| KRT28 | 17-38950272-TG-CA | aCA/aTG | T/M | Changed missense |
| KRT40 | 17-39135214-TTG-CTA | CaA/TaG | Q/* | Unchanged |
| KRTAP1-4 | 17-39186097-GT-AC | tAC/tGT | Y/C | Unchanged |
| KRTAP4-1 | 17-39340910-TG-CA | CAc/TGc | H/C | Changed missense |
| KRTAP9-3 | 17-39389025-GT-AC | gGT/gAC | G/D | Unchanged |
| KRT32 | 17-39619093-GT-AC | aAC/aGT | N/S | Unchanged |
| KRT32 | 17-39623363-TG-CA | CAg/TGg | Q/W | Rescued nonsense |
| KRT13 | 17-39659193-GT-AC | ACc/GTc | T/V | Changed missense |
| KRT16 | 17-39766679-TG-AC | CAg/GTg | Q/V | Changed missense |
| NT5C3B | 17-39987130-TG-CA | gCA/gTG | A/V | Unchanged |
| RUNDC1 | 17-41133071-TG-CA | TGg/CAg | W/Q | Rescued nonsense |
| MPP2 | 17-41960343-TG-CA | aCA/aTG | T/M | Changed missense |
| MPP2 | 17-41960634-GT-CA | cAC/cTG | H/L | Partially changed missense |
| KIF18B | 17-43003484-TG-CA | gCA/gTG | A/V | Unchanged |
| WNT9B | 17-44950122-TG-CA | aTG/aCA | M/T | Partially changed missense |
| B4GALNT2 | 17-47246163-TG-CA | TGc/CAc | C/H | Changed missense |
| COL1A1 | 17-48265493-GGT-AGC | AcC/GcT | T/A | Unchanged |
| RSAD1 | 17-48557348-TG-CA | tTG/tCA | L/S | Unchanged |
| BZRAP1 | 17-56396609-TG-CA | CAg/TGg | Q/W | Rescued nonsense |
| MTMR4 | 17-56572524-TG-CA | aCA/aTG | T/M | Changed missense |
| MTMR4 | 17-56584506-GCT-ACC | AgC/GgT | S/G | Unchanged |
| 44078 | 17-56598439-TG-CA | aCA/aTG | T/M | Changed missense |
| C17orf47 | 17-56621359-TG-CA | tCA/tTG | S/L | Unchanged |
| KCNH6 | 17-61611421-GAT-AAC | GaT/AaC | D/N | Unchanged |
| ARSG | 17-66364804-TG-CA | TGg/CAg | W/Q | Rescued nonsense |
| C17orf80 | 17-71232807-TG-CA | TGt/CAt | C/H | Changed missense |
| SDK2 | 17-71503636-TG-CA | cCA/cTG | P/L | Unchanged |
| TTYH2 | 17-72233559-GT-AC | GTt/ACt | V/T | Changed missense |
| NAT9 | 17-72769136-TG-CA | CAg/TGg | Q/W | Rescued nonsense |
| TMEM104 | 17-72784932-GT-AC | GTg/ACg | V/T | Changed missense |
| RECQL5 | 17-73625430-GT-AC | cAC/cGT | H/R | Unchanged |
| RECQL5 | 17-73625478-TG-CA | aCA/aTG | T/M | Changed missense |
| ITGB4 | 17-73753503-TG-CA | cTG/cCA | L/P | Unchanged |
| EVPL | 17-74014668-TG-CA | CAg/TGg | Q/W | Rescued nonsense |
| QRICH2 | 17-74287389-TG-CA | CAt/TGt | H/C | Changed missense |
| QRICH2 | 17-74288262-TG-CA | CAt/TGt | H/C | Changed missense |
| C17orf99 | 17-76157266-TG-CA | TGg/CAg | W/Q | Rescued nonsense |
| TK1 | 17-76178748-TG-CA | gCA/gTG | A/V | Unchanged |
| TMEM235 | 17-76230728-GT-AC | tGT/tAC | C/Y | Unchanged |
| DNAH17 | 17-76433897-GT-AC | cAC/cGT | H/R | Unchanged |
| DNAH17 | 17-76433898-TG-CA | CAc/TGc | H/C | Changed missense |
| DNAH17 | 17-76571086-GAT-AAC | AtC/GtT | I/V | Unchanged |
| C1QTNF1 | 17-77040127-GT-AC | cGT/cAC | R/H | Unchanged |
| ENPP7 | 17-77704912-TG-CA | cTG/cCA | L/P | Unchanged |
| ENPP7 | 17-77705043-GAT-AAC | GaT/AaC | D/N | Unchanged |
| CCDC40 | 17-78071050-GAT-AAC | GaT/AaC | D/N | Unchanged |
| RNF213 | 17-78263486-TG-CA | aTG/aCA | M/T | Partially changed missense |
| AZI1 | 17-79173224-TG-CA | aCA/aTG | T/M | Changed missense |
| SLC38A10 | 17-79220016-TG-CA | gCA/gTG | A/V | Unchanged |
| SLC38A10 | 17-79244802-TG-CA | aCA/aTG | T/M | Changed missense |
| TSPAN10 | 17-79612382-TG-CA | gTG/gCA | V/A | Unchanged |
| SLC25A10 | 17-79682557-GT-AC | cGT/cAC | R/H | Unchanged |
| PYCR1 | 17-79891147-TG-CA | tCA/tTG | S/L | Unchanged |
| ASPSCR1 | 17-79974729-GAT-AAC | GaT/AaC | D/N | Unchanged |
| NARF | 17-80442721-GT-AC | cGT/cAC | R/H | Unchanged |
| ZNF750 | 17-80788465-TG-CA | gCA/gTG | A/V | Unchanged |
| TBCD | 17-80863857-TG-CA | aTG/aCA | M/T | Partially changed missense |
| TBCD | 17-80887242-GAT-AAC | GaT/AaC | D/N | Unchanged |
| COLEC12 | 18-334758-TG-CA | cCA/cTG | P/L | Unchanged |
| LAMA1 | 18-6999628-TG-CA | tCA/tTG | S/L | Unchanged |
| PIEZO2 | 18-10763007-TG-CA | aCA/aTG | T/M | Changed missense |
| CEP192 | 18-13056682-GT-AC | GTg/ACg | V/T | Changed missense |
| CEP192 | 18-13095609-TG-CA | cTG/cCA | L/P | Unchanged |
| POTEC | 18-14543138-GT-AC | ACt/GTt | T/V | Changed missense |
| CTAGE1 | 18-19995753-TG-CA | cCA/cTG | P/L | Unchanged |
| NPC1 | 18-21119777-GT-AC | aAC/aGT | N/S | Unchanged |
| NPC1 | 18-21140432-TG-CA | CAt/TGt | H/C | Changed missense |
| LAMA3 | 18-21413867-GCT-ACC | GcT/AcC | A/T | Unchanged |
| MOCOS | 18-33848581-TG-CA | gTG/gCA | V/A | Unchanged |
| ZBTB7C | 18-45555829-TG-CA | aCA/aTG | T/M | Changed missense |
| MYO5B | 18-47500836-GT-AC | aAC/aGT | N/S | Unchanged |
| MYO5B | 18-47563297-GGT-AGC | AcC/GcT | T/A | Unchanged |
| MRO | 18-48331524-GT-AC | gAC/gGT | D/G | Unchanged |
| DYNAP | 18-52258547-GT-AC | GTt/ACt | V/T | Changed missense |
| FECH | 18-55221648-TG-CA | cCA/cTG | P/L | Unchanged |
| ALPK2 | 18-56204747-GT-AC | ACc/GTc | T/V | Changed missense |
| SERPINB4 | 18-61308176-GT-AC | ACt/GTt | T/V | Changed missense |
| SERPINB3 | 18-61322973-TG-CA | CAt/TGt | H/C | Changed missense |
| FAM69C | 18-72103782-TG-CA | CAa/TGa | Q/* | Unchanged |
| ZNF516 | 18-74154999-GT-AC | aAC/aGT | N/S | Unchanged |
| LPPR3 | 19-813219-GT-AC | ACg/GTg | T/V | Changed missense |
| GRIN3B | 19-1004740-TG-CA | TGg/CAg | W/Q | Rescued nonsense |
| C19orf26 | 19-1231141-GT-AC | cAC/cGT | H/R | Unchanged |
| MOB3A | 19-2078488-TG-CA | cCA/cTG | P/L | Unchanged |
| AP3D1 | 19-2111741-TGG-CGA | CcA/TcG | P/S | Unchanged |
| ZNF77 | 19-2934282-TG-CA | tCA/tTG | S/L | Unchanged |
| CACTIN | 19-3611972-GT-AC | aAC/aGT | N/S | Unchanged |
| PIP5K1C | 19-3641792-TG-CA | cCA/cTG | P/L | Unchanged |
| TJP3 | 19-3750615-TG-CA | aTG/aCA | M/T | Partially changed missense |
| FSD1 | 19-4306310-GT-AC | cGT/cAC | R/H | Unchanged |
| PLIN4 | 19-4511380-GGT-AGC | AcC/GcT | T/A | Unchanged |
| PLIN4 | 19-4511381-GT-AC | ACc/GTc | T/V | Changed missense |
| PLIN4 | 19-4511401-GAT-AAC | AtC/GtT | I/V | Unchanged |
| PLIN4 | 19-4511659-TG-CA | aCA/aTG | T/M | Changed missense |
| PLIN4 | 19-4512667-GGT-AGC | AcC/GcT | T/A | Unchanged |
| TICAM1 | 19-4818378-TG-CA | aCA/aTG | T/M | Changed missense |
| ZNRF4 | 19-5455977-GT-AC | GTg/ACg | V/T | Changed missense |
| ZNRF4 | 19-5455978-TG-CA | gTG/gCA | V/A | Unchanged |
| LONP1 | 19-5696146-GGT-AGC | AcC/GcT | T/A | Unchanged |
| PRR22 | 19-5783634-TG-CA | cCA/cTG | P/L | Unchanged |
| FUT6 | 19-5831724-TG-CA | cCA/cTG | P/L | Unchanged |
| FUT6 | 19-5832249-TCG-CCA | CgA/TgG | R/W | Rescued nonsense |
| FUT5 | 19-5866736-TG-CA | CAc/TGc | H/C | Changed missense |
| FUT5 | 19-5866816-GT-AC | gAC/gGT | D/G | Unchanged |
| FUT5 | 19-5866840-TG-CA | cCA/cTG | P/L | Unchanged |
| EMR1 | 19-6896483-GCT-ACC | GcT/AcC | A/T | Unchanged |
| EMR1 | 19-6926378-TG-CA | aTG/aCA | M/T | Partially changed missense |
| AC025278.1 | 19-7011826-TG-CA | TGg/CAg | W/Q | Rescued nonsense |
| STXBP2 | 19-7711219-GAT-AAC | GaT/AaC | D/N | Unchanged |
| LRRC8E | 19-7963976-TG-CA | aTG/aCA | M/T | Partially changed missense |
| FBN3 | 19-8181644-TG-CA | CAa/TGa | Q/* | Unchanged |
| ZNF558 | 19-8922729-TG-CA | CAt/TGt | H/C | Changed missense |
| MBD3L1 | 19-8953799-GTT-ATC | GtT/AtC | V/I | Unchanged |
| MUC16 | 19-9003645-GT-AC | ACt/GTt | T/V | Changed missense |
| MUC16 | 19-9048421-TG-CA | aCA/aTG | T/M | Changed missense |
| MUC16 | 19-9060812-TG-CA | tCA/tTG | S/L | Unchanged |
| MUC16 | 19-9065594-GGT-AGC | AcC/GcT | T/A | Unchanged |
| MUC16 | 19-9076082-TG-CA | aCA/aTG | T/M | Changed missense |
| OR7G2 | 19-9213972-TG-CA | CAg/TGg | Q/W | Rescued nonsense |
| ZNF562 | 19-9764069-TG-CA | gCA/gTG | A/V | Unchanged |
| ZNF812 | 19-9801502-TG-CA | CAt/TGt | H/C | Changed missense |
| ZNF812 | 19-9801717-TG-CA | gCA/gTG | A/V | Unchanged |
| RDH8 | 19-10131999-TG-CA | aTG/aCA | M/T | Partially changed missense |
| DNMT1 | 19-10265312-TG-CA | aCA/aTG | T/M | Changed missense |
| DNMT1 | 19-10291181-TG-CA | CAt/TGt | H/C | Changed missense |
| ICAM3 | 19-10449512-GAT-AAC | AtC/GtT | I/V | Unchanged |
| ATG4D | 19-10659706-TG-CA | gTG/gCA | V/A | Unchanged |
| KRI1 | 19-10676680-GT-AC | ACc/GTc | T/V | Changed missense |
| AP1M2 | 19-10692000-TG-CA | tCA/tTG | S/L | Unchanged |
| DOCK6 | 19-11319491-GT-AC | aAC/aGT | N/S | Unchanged |
| DOCK6 | 19-11319491-GTT-ATC | AaC/GaT | N/D | Unchanged |
| CCDC159 | 19-11465316-GT-CA | tGT/tCA | C/S | Rescued nonsense |
| PRKCSH | 19-11553279-GCT-ACC | GcT/AcC | A/T | Unchanged |
| RNASEH2A | 19-12921186-TG-CA | tTG/tCA | L/S | Unchanged |
| DNASE2 | 19-12989560-GCT-ACC | AgC/GgT | S/G | Unchanged |
| C19orf57 | 19-14000170-TG-CA | CAg/TGg | Q/W | Rescued nonsense |
| SAMD1 | 19-14199338-GT-AC | ACc/GTc | T/V | Changed missense |
| OR7A5 | 19-14938833-GT-AC | ACt/GTt | T/V | Changed missense |
| NOTCH3 | 19-15292437-TG-CA | cCA/cTG | P/L | Unchanged |
| NOTCH3 | 19-15302844-TG-CA | gCA/gTG | A/V | Unchanged |
| CYP4F3 | 19-15763720-TG-CA | gTG/gCA | V/A | Unchanged |
| CYP4F12 | 19-15793235-TG-CA | TGt/CAt | C/H | Changed missense |
| OR10H5 | 19-15905271-TG-CA | cTG/cCA | L/P | Unchanged |
| OR10H1 | 19-15918500-GGT-AGC | AcC/GcT | T/A | Unchanged |
| CHERP | 19-16633950-TG-CA | cCA/cTG | P/L | Unchanged |
| CPAMD8 | 19-17004049-TG-CA | CAg/TGg | Q/W | Rescued nonsense |
| MYO9B | 19-17316781-GT-AC | GTt/ACt | V/T | Changed missense |
| USE1 | 19-17330060-TG-CA | tTG/tCA | L/S | Unchanged |
| USHBP1 | 19-17366278-TG-CA | gCA/gTG | A/V | Unchanged |
| ANKLE1 | 19-17396548-GT-AC | gGT/gAC | G/D | Unchanged |
| ANO8 | 19-17435884-TG-CA | tCA/tTG | S/L | Unchanged |
| IL12RB1 | 19-18186618-TG-CA | CAg/TGg | Q/W | Rescued nonsense |
| KIAA1683 | 19-18375815-GT-AC | aAC/aGT | N/S | Unchanged |
| COPE | 19-19011244-TG-CA | cCA/cTG | P/L | Unchanged |
| ZNF729 | 19-22498942-GT-AC | tGT/tAC | C/Y | Unchanged |
| ZNF98 | 19-22574699-TG-CA | tCA/tTG | S/L | Unchanged |
| UQCRFS1 | 19-29704002-TG-CA | tCA/tTG | S/L | Unchanged |
| WDR88 | 19-33647379-TG-CA | TGt/CAt | C/H | Changed missense |
| LSR | 19-35741454-GTT-ATC | GtT/AtC | V/I | Unchanged |
| GPR42 | 19-35863028-TG-CA | gTG/gCA | V/A | Unchanged |
| APLP1 | 19-36370010-TG-CA | gTG/gCA | V/A | Unchanged |
| WDR62 | 19-36590329-TG-CA | tTG/tCA | L/S | Unchanged |
| ZNF260 | 19-37004938-TG-CA | tCA/tTG | S/L | Unchanged |
| ZNF790 | 19-37310344-TG-CA | CAg/TGg | Q/W | Rescued nonsense |
| ZNF568 | 19-37441365-TG-CA | aTG/aCA | M/T | Partially changed missense |
| ZNF420 | 19-37619613-TTG-CTA | TtG/CtA | L | Unchanged |
| ZNF585A | 19-37644051-TG-CA | gCA/gTG | A/V | Unchanged |
| ZNF607 | 19-38189616-TG-CA | aCA/aTG | T/M | Changed missense |
| CAPN12 | 19-39226927-TG-CA | CAt/TGt | H/C | Changed missense |
| DLL3 | 19-39994711-TG-CA | cTG/cCA | L/P | Unchanged |
| LGALS14 | 19-40197924-TG-CA | TGt/CAt | C/H | Changed missense |
| FCGBP | 19-40367862-TG-CA | cCA/cTG | P/L | Unchanged |
| FCGBP | 19-40367862-TGG-CGA | CcA/TcG | P/S | Unchanged |
| FCGBP | 19-40392359-TG-CA | gCA/gTG | A/V | Unchanged |
| FCGBP | 19-40408053-TG-CA | cCA/cTG | P/L | Unchanged |
| ADCK4 | 19-41211056-TG-CA | CAc/TGc | H/C | Changed missense |
| CYP2A7 | 19-41384675-TG-CA | CAc/TGc | H/C | Changed missense |
| EXOSC5 | 19-41903220-GT-AC | ACg/GTg | T/V | Changed missense |
| CEACAM6 | 19-42265243-GT-AC | GTt/ACt | V/T | Changed missense |
| DMRTC2 | 19-42354628-GT-AC | gGT/gAC | G/D | Unchanged |
| PSG8 | 19-43269704-TG-CA | aCA/aTG | T/M | Changed missense |
| PSG11 | 19-43519440-GTT-ATC | AaC/GaT | N/D | Unchanged |
| PSG4 | 19-43699424-TG-CA | cCA/cTG | P/L | Unchanged |
| PSG4 | 19-43709659-TG-CA | aCA/aTG | T/M | Changed missense |
| XRCC1 | 19-44055726-TG-CA | CAg/TGg | Q/W | Rescued nonsense |
| SRRM5 | 19-44117598-GT-AC | aGT/aAC | S/N | Unchanged |
| ZNF221 | 19-44470420-TG-CA | TGt/CAt | C/H | Changed missense |
| ZNF155 | 19-44500761-GT-AC | cGT/cAC | R/H | Unchanged |
| ZNF235 | 19-44792967-TAG-CAA | CtA/TtG | L | Unchanged |
| ZNF180 | 19-44981832-TG-CA | CAt/TGt | H/C | Changed missense |
| APOC4 | 19-45448036-TG-CA | cTG/cCA | L/P | Unchanged |
| APOC4-APOC2 | 19-45448036-TG-CA | cTG/cCA | L/P | Unchanged |
| CLPTM1 | 19-45490635-GT-AC | gGT/gAC | G/D | Unchanged |
| HIF3A | 19-46815497-GAT-AAC | GaT/AaC | D/N | Unchanged |
| PPP5D1 | 19-47030234-TG-CA | gCA/gTG | A/V | Unchanged |
| CCDC9 | 19-47774772-TG-CA | cTG/cCA | L/P | Unchanged |
| FAM83E | 19-49116357-GGT-AGC | AcC/GcT | T/A | Unchanged |
| SPHK2 | 19-49132360-TG-CA | cTG/cCA | L/P | Unchanged |
| SIGLEC11 | 19-50461664-TG-CA | tCA/tTG | S/L | Unchanged |
| VRK3 | 19-50491733-GCT-ACC | AgC/GgT | S/G | Unchanged |
| KLK14 | 19-51584951-TG-CA | CAg/TGg | Q/W | Rescued nonsense |
| SIGLEC9 | 19-51628481-TG-CA | TGg/CAg | W/Q | Rescued nonsense |
| SIGLEC9 | 19-51631236-TG-CA | gTG/gCA | V/A | Unchanged |
| SIGLEC12 | 19-52000672-GT-AC | ACg/GTg | T/V | Changed missense |
| ZNF577 | 19-52376119-GT-AC | ACt/GTt | T/V | Changed missense |
| ZNF615 | 19-52497745-TG-CA | CAg/TGg | Q/W | Rescued nonsense |
| ZNF28 | 19-53303745-TTG-CTA | CaA/TaG | Q/* | Unchanged |
| ZNF468 | 19-53344426-TG-CA | CAt/TGt | H/C | Changed missense |
| ZNF665 | 19-53669273-TG-CA | CAt/TGt | H/C | Changed missense |
| VN1R2 | 19-53761740-TG-CA | TGc/CAc | C/H | Changed missense |
| VN1R4 | 19-53770385-TG-CA | aCA/aTG | T/M | Changed missense |
| ZNF331 | 19-54080067-TG-CA | TGt/CAt | C/H | Changed missense |
| CNOT3 | 19-54652202-GT-AC | gGT/gAC | G/D | Unchanged |
| MBOAT7 | 19-54677759-TG-CA | cCA/cTG | P/L | Unchanged |
| MBOAT7 | 19-54677759-TGG-CGA | CcA/TcG | P/S | Unchanged |
| LILRB3 | 19-54725755-TG-CA | aCA/aTG | T/M | Changed missense |
| LILRB3 | 19-54726226-TG-CA | gCA/gTG | A/V | Unchanged |
| LILRA6 | 19-54745507-TG-CA | aCA/aTG | T/M | Changed missense |
| LILRB2 | 19-54784130-TG-CA | CAc/TGc | H/C | Changed missense |
| LILRA4 | 19-54844900-TG-CA | gCA/gTG | A/V | Unchanged |
| AC009892.10 | 19-55147504-TG-CA | gCA/gTG | A/V | Unchanged |
| KIR2DL1 | 19-55286650-TG-CA | cTG/cCA | L/P | Unchanged |
| TMEM86B | 19-55738634-TG-CA | CAg/TGg | H/C | Changed missense |
| SSC5D | 19-56024519-TG-CA | cTG/cCA | L/P | Unchanged |
| FIZ1 | 19-56104134-GGT-AGC | AcC/GcT | T/A | Unchanged |
| FIZ1 | 19-56104135-GT-AC | ACc/GTc | T/V | Changed missense |
| NLRP4 | 19-56369591-GCT-ACC | GcT/AcC | A/T | Unchanged |
| NLRP8 | 19-56473459-GT-AC | cGT/cAC | R/H | Unchanged |
| NLRP8 | 19-56477710-TG-CA | gTG/gCA | V/A | Unchanged |
| ZSCAN5C | 19-56717604-GGT-AGC | GgT/AgC | G/S | Unchanged |
| ZSCAN5D | 19-56751782-TG-CA | TGc/CAc | C/H | Changed missense |
| ZNF667 | 19-56953863-TG-CA | aCA/aTG | T/M | Changed missense |
| ZNF749 | 19-57956186-TG-CA | gTG/gCA | V/A | Unchanged |
| A1BG | 19-58864479-TG-CA | CAc/TGc | H/C | Changed missense |
| TPO | 2-1520676-TG-CA | gTG/gCA | V/A | Unchanged |
| APOB | 2-21232804-GT-AC | gAC/gGT | D/G | Unchanged |
| ADCY3 | 2-25046090-TG-CA | tCA/tTG | S/L | Unchanged |
| KIF3C | 2-26203678-TG-CA | CAg/TGg | Q/W | Rescued nonsense |
| DRC1 | 2-26667615-TG-CA | TGg/CAg | W/Q | Rescued nonsense |
| CIB4 | 2-26804247-TG-CA | CAc/TGc | H/C | Changed missense |
| SLC5A6 | 2-27423929-TG-CA | cCA/cTG | P/L | Unchanged |
| GCKR | 2-27730940-TG-CA | cTG/cCA | L/P | Unchanged |
| AC074091.13 | 2-27930502-GT-CA | aAC/aTG | N/M | Changed missense |
| PLB1 | 2-28865760-TTG-CTA | TtG/CtA | L | Unchanged |
| FAM179A | 2-29246044-TG-CA | gTG/gCA | V/A | Unchanged |
| LTBP1 | 2-33585795-GT-AC | GTg/ACg | V/T | Changed missense |
| LTBP1 | 2-33585796-TG-CA | gTG/gCA | V/A | Unchanged |
| FEZ2 | 2-36810586-TG-CA | aCA/aTG | T/M | Changed missense |
| HAAO | 2-43015717-GAT-AAC | AtC/GtT | I/V | Unchanged |
| ABCG8 | 2-44104924-GT-AC | GTc/ACc | V/T | Changed missense |
| EPCAM | 2-47601106-TG-CA | aTG/aCA | M/T | Partially changed missense |
| ETAA1 | 2-67630476-TG-CA | aTG/aCA | M/T | Partially changed missense |
| ARHGAP25 | 2-69049941-TG-CA | aTG/aCA | M/T | Partially changed missense |
| ASPRV1 | 2-70188675-GT-AC | ACt/GTt | T/V | Changed missense |
| REG3G | 2-79253947-TG-CA | aTG/aCA | M/T | Partially changed missense |
| REG3A | 2-79385786-TG-CA | aCA/aTG | T/M | Changed missense |
| CTNNA2 | 2-80801344-GTT-ATC | GtT/AtC | V/I | Unchanged |
| IMMT | 2-86371883-TG-CA | gCA/gTG | A/V | Unchanged |
| IGKJ3 | 2-89160737-GAT-AAC | AtC/GtT | I/V | Unchanged |
| IGKJ2 | 2-89161053-GGT-AGC | AcC/GcT | T/A | Unchanged |
| IGKJ2 | 2-89161054-GT-AC | ACc/GTc | T/V | Changed missense |
| IGKV1-5 | 2-89246850-GT-AC | ACt/GTt | T/V | Changed missense |
| IGKV1-5 | 2-89247011-GCT-ACC | AgC/GgT | S/G | Unchanged |
| IGKV3-7 | 2-89278101-GCT-ACC | AgC/GgT | S/G | Unchanged |
| IGKV1-8 | 2-89292169-GT-AC | ACa/GTa | T/V | Changed missense |
| IGKV3-11 | 2-89326863-GCT-ACC | AgC/GgT | S/G | Unchanged |
| IGKV3-15 | 2-89384784-GAT-AAC | AtC/GtT | I/V | Unchanged |
| IGKV3-15 | 2-89384814-GAT-CAA | AtC/TtG | I/L | Changed missense |
| IGKV1-33 | 2-89567875-TG-AC | aCA/aGT | T/S | Changed missense |
| IGKV2D-28 | 2-89999461-GT-AC | aGT/aAC | S/N | Unchanged |
| ASTL | 2-96795857-TG-CA | CAg/TGg | Q/W | Rescued nonsense |
| FAM178B | 2-97613616-TG-CA | aCA/aTG | T/M | Changed missense |
| TBC1D8 | 2-101656725-GT-AC | ACg/GTg | T/V | Changed missense |
| IL1RL1 | 2-102968362-TG-CA | tTG/tCA | L/S | Unchanged |
| MYO7B | 2-128338393-TG-CA | cTG/cCA | L/P | Unchanged |
| POTEF | 2-130832358-TG-CA | CAt/TGt | H/C | Changed missense |
| CCDC74B | 2-130899804-TG-CA | CAt/TGt | H/C | Changed missense |
| SMPD4 | 2-130910452-TG-CA | gCA/gTG | A/V | Unchanged |
| TUBA3E | 2-130951584-TG-CA | tCA/tTG | S/L | Unchanged |
| POTEI | 2-131221283-GT-AC | aAC/aGT | N/S | Unchanged |
| POTEI | 2-131221445-GT-AC | gAC/gGT | D/G | Unchanged |
| POTEJ | 2-131414431-TG-CA | TGc/CAc | C/H | Changed missense |
| NCKAP5 | 2-133541444-TGG-CGA | CcA/TcG | P/S | Unchanged |
| LRP1B | 2-141459829-TG-CA | aCA/aTG | T/M | Changed missense |
| LRP1B | 2-141571329-TG-CA | tCA/tTG | S/L | Unchanged |
| LRP1B | 2-142567910-TG-CA | CAg/TGg | Q/W | Rescued nonsense |
| NEB | 2-152387553-TG-CA | aCA/aTG | T/M | Changed missense |
| CCDC148 | 2-159201754-TG-CA | CAg/TGg | Q/W | Rescued nonsense |
| DAPL1 | 2-159663599-TG-CA | cTG/cCA | L/P | Unchanged |
| LY75 | 2-160639970-TG-CA | tCA/tTG | S/L | Unchanged |
| CD302 | 2-160639970-TG-CA | tCA/tTG | S/L | Unchanged |
| LY75-CD302 | 2-160639970-TG-CA | tCA/tTG | S/L | Unchanged |
| LY75-CD302 | 2-160710922-TG-CA | gCA/gTG | A/V | Unchanged |
| LY75 | 2-160710922-TG-CA | gCA/gTG | A/V | Unchanged |
| LY75 | 2-160711045-GT-CA | gAC/gTG | D/V | Partially changed missense |
| LY75-CD302 | 2-160711045-GT-CA | gAC/gTG | D/V | Partially changed missense |
| SCN1A | 2-166848634-TAG-CAA | CtA/TtG | L | Unchanged |
| ABCB11 | 2-169789016-TG-CA | gCA/gTG | A/V | Unchanged |
| LRP2 | 2-169997051-GAT-AAC | AtC/GtT | I/V | Unchanged |
| LRP2 | 2-170103336-TG-CA | aCA/aTG | T/M | Changed missense |
| TTN | 2-179428672-TG-AC | CAa/GTa | Q/V | Changed missense |
| TTN | 2-179430997-GT-AC | ACg/GTg | T/V | Changed missense |
| TTN | 2-179517654-TG-CA | cCA/cTG | P/L | Unchanged |
| FSIP2 | 2-186656956-TG-CA | aTG/aCA | M/T | Partially changed missense |
| COL5A2 | 2-189932831-TG-CA | cCA/cTG | P/L | Unchanged |
| COL5A2 | 2-189932831-TGG-CGA | CcA/TcG | P/S | Unchanged |
| SLC40A1 | 2-190430141-TAG-CAA | CtA/TtG | L | Unchanged |
| MYO1B | 2-192279327-TTG-CTA | TtG/CtA | L | Unchanged |
| PLCL1 | 2-198950240-GT-AC | GTa/ACa | V/T | Changed missense |
| TRAK2 | 2-202260049-GT-AC | cAC/cGT | H/R | Unchanged |
| RAPH1 | 2-204305093-TG-CA | cCA/cTG | P/L | Unchanged |
| PIKFYVE | 2-209190330-TG-CA | tTG/tCA | L/S | Unchanged |
| ABCA12 | 2-215865575-TG-CA | cCA/cTG | P/L | Unchanged |
| TNS1 | 2-218750817-TG-CA | cCA/cTG | P/L | Unchanged |
| ASIC4 | 2-220402680-TG-CA | gTG/gCA | V/A | Unchanged |
| CHPF | 2-220405321-TG-CA | CAg/TGg | Q/W | Rescued nonsense |
| OBSL1 | 2-220419236-TG-CA | aCA/aTG | T/M | Changed missense |
| IRS1 | 2-227661043-TG-CA | gCA/gTG | A/V | Unchanged |
| COL4A3 | 2-228111435-TG-CA | cTG/cCA | L/P | Unchanged |
| TRIP12 | 2-230668858-TG-CA | aCA/aTG | T/M | Changed missense |
| SP140 | 2-231175549-TG-CA | TGt/CAt | C/H | Changed missense |
| SP100 | 2-231406680-TG-CA | aTG/aCA | M/T | Partially changed missense |
| PSMD1 | 2-231934755-TG-CA | aTG/aCA | M/T | Partially changed missense |
| ECEL1 | 2-233349587-TG-CA | CAt/TGt | H/C | Changed missense |
| KCNJ13 | 2-233633459-TG-CA | aCA/aTG | T/M | Changed missense |
| UGT1A5 | 2-234621780-TG-CA | tTG/tCA | L/S | Unchanged |
| UGT1A5 | 2-234621810-TG-CA | gTG/gCA | V/A | Unchanged |
| UGT1A3 | 2-234637803-TG-CA | TGg/CAg | W/Q | Rescued nonsense |
| UGT1A8 | 2-234637803-TG-CA | TGg/CAg | W/Q | Rescued nonsense |
| MROH2A | 2-234725502-TG-CA | TGg/CAg | W/Q | Rescued nonsense |
| SH3BP4 | 2-235950185-GAT-AAC | GaT/AaC | D/N | Unchanged |
| COL6A3 | 2-238243285-GT-AC | cAC/cGT | H/R | Unchanged |
| ESPNL | 2-239039637-TG-CA | gTG/gCA | V/A | Unchanged |
| ESPNL | 2-239040185-GGT-AGC | GgT/AgC | G/S | Unchanged |
| NDUFA10 | 2-240944638-GT-AC | cAC/cGT | H/R | Unchanged |
| OR6B3 | 2-240985347-GT-AC | ACc/GTc | T/V | Changed missense |
| GPR35 | 2-241569704-TG-AC | gTG/gAC | V/D | Changed missense |
| PASK | 2-242066314-TG-CA | gCA/gTG | A/V | Unchanged |
| PASK | 2-242066374-GT-AC | aAC/aGT | N/S | Unchanged |
| PASK | 2-242082262-TG-CA | aCA/aTG | T/M | Changed missense |
| DEFB132 | 20-239936-GT-AC | GTa/ACa | V/T | Changed missense |
| SIRPG | 20-1610894-GT-AC | tAC/tGT | Y/C | Unchanged |
| SIRPA | 20-1895796-TG-CA | tTG/tCA | L/S | Unchanged |
| SIRPA | 20-1896059-GT-AC | GTg/ACg | V/T | Changed missense |
| TGM6 | 20-2375106-GT-AC | GTc/ACc | V/T | Changed missense |
| ZNF343 | 20-2464059-TG-CA | tCA/tTG | S/L | Unchanged |
| NOP56 | 20-2638579-TG-CA | aTG/aCA | M/T | Partially changed missense |
| C20orf196 | 20-5843810-GGT-AGC | GgT/AgC | G/S | Unchanged |
| PLCB1 | 20-8755241-GCT-ACC | GcT/AcC | A/T | Unchanged |
| BFSP1 | 20-17474968-TG-CA | cCA/cTG | P/L | Unchanged |
| DZANK1 | 20-18445919-GTT-ATC | AaC/GaT | N/D | Unchanged |
| CSTL1 | 20-23424613-TG-CA | TGg/CAg | W/Q | Rescued nonsense |
| CST3 | 20-23618395-TAG-CAA | CtA/TtG | L | Unchanged |
| ACSS1 | 20-25011423-TG-CA | gCA/gTG | A/V | Unchanged |
| PYGB | 20-25264812-GAT-AAC | GaT/AaC | D/N | Unchanged |
| ASXL1 | 20-31022959-TG-CA | cTG/cCA | L/P | Unchanged |
| BPIFB4 | 20-31672757-GT-AC | gGT/gAC | G/D | Unchanged |
| CPNE1 | 20-34219496-TG-CA | CAa/TGa | Q/* | Unchanged |
| KIAA1755 | 20-36841756-TG-CA | tCA/tTG | S/L | Unchanged |
| SEMG2 | 20-43851094-GT-AC | aGT/aAC | S/N | Unchanged |
| PREX1 | 20-47249170-GT-AC | aAC/aGT | N/S | Unchanged |
| TSHZ2 | 20-51870679-GT-AC | GTc/ACc | V/T | Changed missense |
| TSHZ2 | 20-51871883-GT-AC | aGT/aAC | S/N | Unchanged |
| PCK1 | 20-56139402-GT-AC | gGT/gAC | G/D | Unchanged |
| ZBP1 | 20-56186884-TG-CA | CAg/TGg | Q/W | Rescued nonsense |
| LAMA5 | 20-60912683-TG-CA | aCA/aTG | T/M | Changed missense |
| LAMA5 | 20-60921641-GGT-AGC | AcC/GcT | T/A | Unchanged |
| LAMA5 | 20-60926828-GAT-AAC | AtC/GtT | I/V | Unchanged |
| GATA5 | 20-61039958-TG-CA | cCA/cTG | P/L | Unchanged |
| C20orf166 | 20-61162266-GT-AC | GTg/ACg | V/T | Changed missense |
| C20orf166 | 20-61162267-TG-CA | gTG/gCA | V/A | Unchanged |
| C20orf166 | 20-61167882-TG-CA | TGa/CAa | */Q | Unchanged |
| DIDO1 | 20-61528074-TG-CA | gCA/gTG | A/V | Unchanged |
| HELZ2 | 20-62193445-GT-AC | ACg/GTg | T/V | Changed missense |
| HELZ2 | 20-62196806-GT-AC | cAC/cGT | H/R | Unchanged |
| HELZ2 | 20-62196807-TG-CA | CAc/TGc | H/C | Changed missense |
| HELZ2 | 20-62200575-TG-CA | tCA/tTG | S/L | Unchanged |
| GMEB2 | 20-62221610-TAG-CAA | CtA/TtG | L | Unchanged |
| GMEB2 | 20-62236148-TG-CA | gCA/gTG | A/V | Unchanged |
| TNFRSF6B | 20-62328452-GT-AC | cGT/cAC | R/H | Unchanged |
| SAMD10 | 20-62608654-TG-AC | CAt/GTt | H/V | Changed missense |
| NPBWR2 | 20-62737568-TG-CA | CAg/TGg | Q/W | Rescued nonsense |
| SAMSN1 | 21-15954527-TG-CA | CAc/TGc | H/C | Changed missense |
| NCAM2 | 21-22746187-TG-CA | cTG/cCA | L/P | Unchanged |
| LTN1 | 21-30339232-GCT-ACC | AgC/GgT | S/G | Unchanged |
| SCAF4 | 21-33068962-TG-CA | gCA/gTG | A/V | Unchanged |
| ITSN1 | 21-35260480-GT-AC | cGT/cAC | R/H | Unchanged |
| FKSG68 | 21-37270507-TG-CA | CAg/TGg | Q/W | Rescued nonsense |
| TTC3 | 21-38525356-TG-CA | aTG/aCA | M/T | Partially changed missense |
| KCNJ6 | 21-39086965-TG-CA | cCA/cTG | P/L | Unchanged |
| ERG | 21-39775468-GT-AC | aAC/aGT | N/S | Unchanged |
| PSMG1 | 21-40549466-TG-CA | cCA/cTG | P/L | Unchanged |
| B3GALT5 | 21-41032740-TG-CA | aTG/aCA | M/T | Partially changed missense |
| MX1 | 21-42821112-GT-AC | cGT/cAC | R/H | Unchanged |
| TMPRSS2 | 21-42866296-TG-CA | aCA/aTG | T/M | Changed missense |
| UMODL1 | 21-43531008-TG-CA | aTG/aCA | M/T | Partially changed missense |
| RRP1B | 21-45107562-TG-CA | cTG/cCA | L/P | Unchanged |
| RRP1 | 21-45219522-GTT-ATC | GtT/AtC | V/I | Unchanged |
| C21orf33 | 21-45553595-GT-AC | GTc/ACc | V/T | Changed missense |
| AIRE | 21-45717548-GAT-AAC | GaT/AaC | D/N | Unchanged |
| KRTAP10-1 | 21-45959854-TG-CA | gCA/gTG | A/V | Unchanged |
| KRTAP10-2 | 21-45971225-TG-CA | cCA/cTG | P/L | Unchanged |
| KRTAP10-3 | 21-45977994-GT-AC | ACg/GTg | T/V | Changed missense |
| KRTAP10-3 | 21-45978194-TG-CA | tCA/tTG | S/L | Unchanged |
| KRTAP10-3 | 21-45978338-TG-CA | cCA/cTG | P/L | Unchanged |
| KRTAP10-6 | 21-46011718-TG-CA | cCA/cTG | P/L | Unchanged |
| KRTAP10-6 | 21-46011718-TGG-CGA | CcA/TcG | P/S | Unchanged |
| KRTAP10-6 | 21-46012154-GT-AC | ACc/GTc | T/V | Changed missense |
| KRTAP10-7 | 21-46020523-TG-CA | aTG/aCA | M/T | Unchanged |
| KRTAP10-7 | 21-46021390-GT-CA | aGT/aCA | S/T | Partially changed missense |
| KRTAP10-10 | 21-46058034-GT-AC | GTg/ACg | V/T | Changed missense |
| KRTAP10-10 | 21-46058035-TG-CA | gTG/gCA | V/A | Unchanged |
| COL6A1 | 21-47410929-GGT-AGC | GgT/AgC | G/S | Unchanged |
| COL6A2 | 21-47538960-GT-AC | aGT/aAC | S/N | Unchanged |
| AP001468.1 | 21-47612552-TG-CA | CAt/TGt | H/C | Changed missense |
| AP001468.1 | 21-47613004-TG-CA | cCA/cTG | P/L | Unchanged |
| PCNT | 21-47787001-GT-AC | GTg/ACg | V/T | Changed missense |
| PCNT | 21-47787002-TG-CA | gTG/gCA | V/A | Unchanged |
| CECR1 | 22-17669306-TG-CA | CAt/TGt | H/C | Changed missense |
| AC008132.13 | 22-18835523-TG-CA | gTG/gCA | V/A | Unchanged |
| CLTCL1 | 22-19197896-TG-CA | gCA/gTG | A/V | Unchanged |
| FAM230A | 22-20709734-GT-AC | gGT/gAC | G/D | Unchanged |
| POM121L7 | 22-21481404-TG-CA | gCA/gTG | A/V | Unchanged |
| GGT2 | 22-21563319-TG-CA | gCA/gTG | A/V | Unchanged |
| PPM1F | 22-22287862-GT-AC | aAC/aGT | N/S | Unchanged |
| IGLV7-46 | 22-22724394-TG-CA | tTG/tCA | L/S | Unchanged |
| IGLV1-40 | 22-22764409-GGT-CGA | GgT/CgA | G/R | Unchanged |
| IGLV2-23 | 22-23040770-GT-CA | aGT/aCA | S/T | Partially changed missense |
| IGLV2-11 | 22-23135287-GT-CA | gGT/gCA | G/A | Unchanged |
| IGLV3-1 | 22-23223435-GAT-AAC | GaT/AaC | D/N | Unchanged |
| ZNF70 | 22-24085990-TAG-CAA | CtA/TtG | L | Unchanged |
| CABIN1 | 22-24459437-GT-AC | tGT/tAC | C/Y | Unchanged |
| MYO18B | 22-26173661-TG-CA | TGg/CAg | W/Q | Rescued nonsense |
| MYO18B | 22-26194043-GGT-AGC | GgT/AgC | G/S | Unchanged |
| MYO18B | 22-26194044-GT-AC | gGT/gAC | G/D | Unchanged |
| C22orf31 | 22-29456733-TG-CA | tCA/tTG | S/L | Unchanged |
| SEC14L6 | 22-30934816-TG-CA | CAa/TGa | Q/* | Unchanged |
| OSBP2 | 22-31266544-GCT-ACC | GcT/AcC | A/T | Unchanged |
| MORC2 | 22-31333631-TG-CA | cCA/cTG | P/L | Unchanged |
| RFPL3 | 22-32756682-GT-AC | GTc/ACc | V/T | Changed missense |
| APOL1 | 22-36661565-TG-CA | aTG/aCA | M/T | Partially changed missense |
| FOXRED2 | 22-36897427-TG-CA | gCA/gTG | A/V | Unchanged |
| C22orf23 | 22-38341134-TG-CA | aCA/aTG | T/M | Changed missense |
| APOBEC3F | 22-39445536-GT-AC | GTa/ACa | V/T | Changed missense |
| APOBEC3F | 22-39448283-TG-CA | TGg/CAg | W/Q | Rescued nonsense |
| SERHL2 | 22-42970032-TG-CA | TGc/CAc | C/H | Changed missense |
| A4GALT | 22-43089539-TG-CA | CAg/TGg | Q/W | Rescued nonsense |
| ARFGAP3 | 22-43195109-TG-CA | CAg/TGg | Q/W | Rescued nonsense |
| TTLL12 | 22-43576904-GT-AC | cAC/cGT | H/R | Unchanged |
| PARVB | 22-44395451-TG-CA | TGg/CAg | W/Q | Rescued nonsense |
| PARVB | 22-44489868-TG-CA | gTG/gCA | V/A | Unchanged |
| PRR5 | 22-45075738-TG-CA | aTG/aCA | M/T | Partially changed missense |
| PRR5- | 22-45128231-GT-AC | cGT/cAC | R/H | Unchanged |
| ARHGAP8 | | | | |
| PRR5 | 22-45128231-GT-AC | cGT/cAC | R/H | Unchanged |
| PRR5- | 22-45255629-GT-AC | cGT/cAC | R/H | Unchanged |
| ARHGAP8 | | | | |
| ARHGAP8 | 22-45255629-GT-AC | cGT/cAC | R/H | Unchanged |
| C22orf26 | 22-46447714-TG-CA | CAg/TGg | Q/W | Rescued nonsense |
| FLJ27365 | 22-46505786-TG-CA | TGg/CAg | W/Q | Rescued nonsense |
| GTSE1 | 22-46722400-TG-CA | TGg/CAg | W/Q | Rescued nonsense |
| CTA-299D3.8 | 22-48940551-GCT-ACC | AgC/GgT | S/G | Unchanged |
| ALG12 | 22-50301476-TG-CA | gCA/gTG | A/V | Unchanged |
| PIM3 | 22-50356692-GT-AC | GTc/ACc | V/T | Changed missense |
| MLC1 | 22-50515270-TG-CA | tCA/tTG | S/L | Unchanged |
| DENND6B | 22-50754648-TG-CA | gCA/gTG | A/V | Unchanged |
| LMF2 | 22-50941985-TTG-CTA | CaA/TaG | Q/* | Unchanged |
| LMF2 | 22-50944128-GT-AC | cAC/cGT | H/R | Unchanged |
| ATG7 | 3-11596300-GAT-AAC | GaT/AaC | D/N | Unchanged |
| CAND2 | 3-12861608-GT-AC | GTc/ACc | V/T | Changed missense |
| TMEM43 | 3-14175262-TG-CA | aTG/aCA | M/T | Partially changed missense |
| RFTN1 | 3-16358584-TG-CA | tCA/tTG | S/L | Unchanged |
| EFHB | 3-19959756-GT-AC | ACc/GTc | T/V | Changed missense |
| DYNC1LI1 | 3-32611851-GTT-ATC | AaC/GaT | N/D | Unchanged |
| TRANK1 | 3-36898715-GT-AC | ACc/GTc | T/V | Changed missense |
| PLCD1 | 3-38051941-TG-CA | cCA/cTG | P/L | Unchanged |
| SLC22A14 | 3-38350519-GT-AC | GTg/ACg | V/T | Changed missense |
| XYLB | 3-38401838-GT-AC | gGT/gAC | G/D | Unchanged |
| SCN5A | 3-38674712-TG-CA | gCA/gTG | A/V | Unchanged |
| XIRP1 | 3-39229900-TG-CA | CAg/TGg | Q/W | Rescued nonsense |
| KLHL40 | 3-42733468-TG-CA | TGc/CAc | C/H | Changed missense |
| TOPAZ1 | 3-44283672-TG-CA | TGc/CAc | C/H | Changed missense |
| CDCP1 | 3-45134822-TG-CA | CAa/TGa | Q/* | Unchanged |
| CCDC12 | 3-47018214-TG-CA | gCA/gTG | A/V | Unchanged |
| COL7A1 | 3-48625266-TG-CA | cCA/cTG | P/L | Unchanged |
| CCDC71 | 3-49200692-TG-AC | CAg/GTg | Q/V | Changed missense |
| BSN | 3-49693411-TG-CA | cTG/cCA | L/P | Unchanged |
| MST1 | 3-49724808-TG-CA | cCA/cTG | P/L | Unchanged |
| GMPPB | 3-49760039-TG-CA | CAg/TGg | Q/W | Rescued nonsense |
| CAMKV | 3-49897244-TG-AC | CAg/GTg | Q/V | Changed missense |
| PCBP4 | 3-51994587-TG-CA | gCA/gTG | A/V | Unchanged |
| RP11- | 3-51994587-TG-CA | gCA/gTG | A/V | Unchanged |
| 155D18.14 | | | | |
| STAB1 | 3-52555443-GT-CA | aGT/aCA | S/T | Partially changed missense |
| STAB1 | 3-52555956-GT-AC | cGT/cAC | R/H | Unchanged |
| RFT1 | 3-53125922-TG-CA | aCA/aTG | T/M | Changed missense |
| PRKCD | 3-53213655-GAT-AAC | GaT/AaC | D/N | Unchanged |
| FLNB | 3-58118555-GT-AC | GTg/ACg | V/T | Changed missense |
| KBTBD8 | 3-67054649-TG-CA | TGt/CAt | C/H | Changed missense |
| FRMD4B | 3-69245453-GT-AC | ACg/GTg | T/V | Changed missense |
| ZNF717 | 3-75787298-TG-CA | tCA/tTG | S/L | Unchanged |
| EPHA3 | 3-89521693-TG-CA | TGg/CAg | W/Q | Rescued nonsense |
| OR5AC2 | 3-97806615-TG-CA | aTG/aCA | M/T | Partially changed missense |
| OR5H6 | 3-97983711-TG-CA | TGt/CAt | C/H | Changed missense |
| OR5K1 | 3-98189157-TG-CA | tTG/tCA | L/S | Unchanged |
| IMPG2 | 3-100963154-GT-AC | ACa/GTa | T/V | Changed missense |
| ALCAM | 3-105260594-GCT-ACC | GcT/AcC | A/T | Unchanged |
| CBLB | 3-105400420-TG-CA | cCA/cTG | P/L | Unchanged |
| MORC1 | 3-108690220-TG-CA | CAt/TGt | H/C | Changed missense |
| DPPA4 | 3-109049384-TG-CA | cCA/cTG | P/L | Unchanged |
| POPDC2 | 3-119367390-TG-CA | tCA/tTG | S/L | Unchanged |
| FBXO40 | 3-121340536-TG-CA | gTG/gCA | V/A | Unchanged |
| GOLGB1 | 3-121412618-TG-CA | CAt/TGt | H/C | Changed missense |
| GOLGB1 | 3-121435621-TTG-CTA | CaA/TaG | Q/* | Unchanged |
| CD86 | 3-121825197-GTT-ATC | GtT/AtC | V/I | Unchanged |
| SEMA5B | 3-122634716-GT-AC | gAC/gGT | D/G | Unchanged |
| MYLK | 3-123452838-GGT-AGC | AcC/GcT | T/A | Unchanged |
| ALDH1L1 | 3-125826058-GT-AC | gAC/gGT | D/G | Unchanged |
| EFCAB12 | 3-129140489-TG-CA | aCA/aTG | T/M | Changed missense |
| PLXND1 | 3-129291751-TG-CA | cCA/cTG | P/L | Unchanged |
| PLXND1 | 3-129293182-GT-AC | cAC/cGT | H/R | Unchanged |
| PLXND1 | 3-129293183-TG-CA | CAc/TGc | H/C | Changed missense |
| TMCC1 | 3-129546727-GCT-ACC | AgC/GgT | S/G | Unchanged |
| SLCO2A1 | 3-133670073-TCG-CCA | CgA/TgG | R/W | Rescued nonsense |
| DZIP1L | 3-137796377-GGT-AGC | AcC/GcT | T/A | Unchanged |
| FAIM | 3-138347988-TG-CA | tTG/tCA | L/S | Unchanged |
| HLTF | 3-148759325-TG-CA | gCA/gTG | A/V | Unchanged |
| P2RY13 | 3-151046308-GT-AC | ACg/GTg | T/V | Changed missense |
| IGSF10 | 3-151154666-TG-CA | aCA/aTG | T/M | Changed missense |
| MME | 3-154861350-GT-AC | aGT/aAC | S/N | Unchanged |
| GFM1 | 3-158366900-GT-AC | GTa/ACa | V/T | Changed missense |
| LXN | 3-158387350-TG-CA | CAa/TGa | Q/* | Unchanged |
| RARRES1 | 3-158450079-GT-AC | gAC/gGT | D/G | Unchanged |
| C3orf80 | 3-159943645-GT-CA | GTg/CAg | V/Q | Changed missense |
| SI | 3-164767022-GT-CA | gAC/gTG | D/V | Partially changed missense |
| NCEH1 | 3-172428782-TG-CA | CAg/TGg | Q/W | Rescued nonsense |
| NAALADL2 | 3-174951756-TG-CA | aTG/aCA | M/T | Partially changed missense |
| AHSG | 3-186337713-TG-CA | aTG/aCA | M/T | Partially changed missense |
| CPN2 | 3-194061906-TG-CA | CAg/TGg | Q/W | Rescued nonsense |
| LRRC15 | 3-194080648-GT-AC | aAC/aGT | N/S | Unchanged |
| LRRC15 | 3-194081152-GTT-ATC | AaC/GaT | N/D | Unchanged |
| LRRC15 | 3-194081635-TG-CA | gCA/gTG | A/V | Unchanged |
| MUC4 | 3-195505662-TGG-CGA | CcA/TcG | P/S | Unchanged |
| MUC4 | 3-195505848-TG-CA | gCA/gTG | A/V | Unchanged |
| MUC4 | 3-195507081-GGT-AGC | AcC/GcT | T/A | Unchanged |
| MUC4 | 3-195507096-TG-CA | gCA/gTG | A/V | Unchanged |
| MUC4 | 3-195507322-GT-AC | ACc/GTc | T/V | Changed missense |
| MUC4 | 3-195509496-TG-CA | gCA/gTG | A/V | Unchanged |
| MUC4 | 3-195510168-TG-CA | gCA/gTG | A/V | Unchanged |
| MUC4 | 3-195510201-GGT-AGC | AcC/GcT | T/A | Unchanged |
| MUC4 | 3-195511512-TG-CA | gCA/gTG | A/V | Unchanged |
| MUC4 | 3-195511560-TG-CA | gCA/gTG | A/V | Unchanged |
| MUC4 | 3-195512187-TG-CA | tCA/tTG | S/L | Unchanged |
| MUC4 | 3-195512328-TG-CA | gCA/gTG | A/V | Unchanged |
| MUC4 | 3-195515385-GGT-AGC | AcC/GcT | T/A | Unchanged |
| MUC4 | 3-195515386-GT-AC | ACc/GTc | T/V | Changed missense |
| MUC4 | 3-195515482-GT-AC | ACc/GTc | T/V | Changed missense |
| WDR53 | 3-196281208-TG-CA | cCA/cTG | P/L | Unchanged |
| PIGZ | 3-196674973-TG-CA | gCA/gTG | A/V | Unchanged |
| MFI2 | 3-196742290-TG-CA | cCA/cTG | P/L | Unchanged |
| MFI2 | 3-196743130-TG-CA | aCA/aTG | T/M | Changed missense |
| ZNF721 | 4-436379-GT-AC | ACg/GTg | T/V | Changed missense |
| GAK | 4-858941-TG-CA | gCA/gTG | A/V | Unchanged |
| TMEM175 | 4-951947-TG-CA | aTG/aCA | M/T | Partially changed missense |
| SLC26A1 | 4-983060-TG-CA | CAg/TGg | Q/W | Rescued nonsense |
| FGFRL1 | 4-1018269-GAT-AAC | GaT/AaC | D/N | Unchanged |
| FGFRL1 | 4-1018749-TG-CA | TGg/CAg | W/Q | Rescued nonsense |
| CRIPAK | 4-1388363-GT-AC | GTg/ACg | V/T | Changed missense |
| CRIPAK | 4-1388411-TG-CA | TGt/CAt | C/H | Changed missense |
| CRIPAK | 4-1388412-GT-AC | tGT/tAC | C/Y | Unchanged |
| CRIPAK | 4-1389156-TG-CA | aTG/aCA | M/T | Partially changed missense |
| CRIPAK | 4-1389366-GT-AC | cGT/cAC | R/H | Unchanged |
| FAM53A | 4-1657281-GGT-AGC | AcC/GcT | T/A | Unchanged |
| TMEM129 | 4-1719294-TG-CA | aCA/aTG | T/M | Changed missense |
| POLN | 4-2181080-TG-CA | aCA/aTG | T/M | Changed missense |
| HAUS3 | 4-2242083-TTG-ATC | CaA/GaT | Q/D | Changed missense |
| ZFYVE28 | 4-2341194-TG-CA | gCA/gTG | A/V | Unchanged |
| GRK4 | 4-3037213-TG-CA | cTG/cCA | L/P | Unchanged |
| GRK4 | 4-3039150-TG-CA | gTG/gCA | V/A | Unchanged |
| HTT | 4-3174738-GT-AC | aGT/aAC | S/N | Unchanged |
| LYAR | 4-4276131-GT-AC | cAC/cGT | H/R | Unchanged |
| LYAR | 4-4276132-TG-CA | CAc/TGc | H/C | Changed missense |
| EVC2 | 4-5624669-GT-AC | ACg/GTg | T/V | Changed missense |
| C4orf50 | 4-5991382-GTT-ATC | AaC/GaT | N/D | Unchanged |
| PSAPL1 | 4-7436151-TG-CA | cCA/cTG | P/L | Unchanged |
| SORCS2 | 4-7714488-GAT-AAC | GaT/AaC | D/N | Unchanged |
| USP17L10 | 4-9213568-GT-AC | GTa/ACa | V/T | Changed missense |
| PPARGC1A | 4-23815924-TG-CA | aCA/aTG | T/M | Changed missense |
| RFC1 | 4-39302029-TG-CA | cCA/cTG | P/L | Unchanged |
| UGDH | 4-39512347-TG-CA | cCA/cTG | P/L | Unchanged |
| KCTD8 | 4-44176960-TG-CA | aCA/aTG | T/M | Changed missense |
| COMMD8 | 4-47455085-TG-CA | gCA/gTG | A/V | Unchanged |
| ATP10D | 4-47525054-TG-CA | TGc/CAc | C/H | Changed missense |
| NFXL1 | 4-47887536-TG-CA | gCA/gTG | A/V | Unchanged |
| NFXL1 | 4-47887991-GGT-AGC | AcC/GcT | T/A | Unchanged |
| FRYL | 4-48582909-GCT-ACC | AgC/GgT | S/G | Unchanged |
| CLOCK | 4-56314977-GT-AC | ACa/GTa | T/V | Changed missense |
| NOA1 | 4-57829649-GT-AC | aAC/aGT | N/S | Unchanged |
| TMPRSS11A | 4-68784774-TG-CA | CAg/TGg | Q/W | Rescued nonsense |
| UGT2B17 | 4-69416556-TG-CA | gCA/gTG | A/V | Unchanged |
| UGT2B28 | 4-70146310-GT-CA | gGT/gCA | G/A | Unchanged |
| UGT2B4 | 4-70346496-GT-AC | cAC/cGT | H/R | Unchanged |
| UGT2B4 | 4-70355211-TG-CA | aCA/aTG | T/M | Changed missense |
| SMR3A | 4-71232430-TG-CA | TGt/CAt | C/H | Changed missense |
| GC | 4-72618296-TG-CA | CAc/TGc | H/C | Changed missense |
| FRAS1 | 4-79350318-TG-CA | cTG/cCA | L/P | Unchanged |
| GK2 | 4-80329343-TG-CA | cCA/cTG | P/L | Unchanged |
| HSD17B11 | 4-88258483-TG-CA | CAa/TGa | Q/* | Unchanged |
| DSPP | 4-88536419-GAT-AAC | GaT/AaC | D/N | Unchanged |
| DSPP | 4-88536549-GT-AC | aGT/aAC | S/N | Unchanged |
| DSPP | 4-88537403-GAT-AAC | GaT/AaC | D/N | Unchanged |
| HERC6 | 4-89311962-TG-CA | TGt/CAt | C/H | Changed missense |
| SMARCAD1 | 4-95170839-GT-AC | aGT/aAC | S/N | Unchanged |
| TBCK | 4-107168430-TG-AC | CAa/GTa | Q/V | Changed missense |
| ALPK1 | 4-113352898-TG-CA | aTG/aCA | M/T | Partially changed missense |
| ALPK1 | 4-113353285-TG-CA | aTG/aGA | M/T | Partially changed missense |
| NUDT6 | 4-123843716-TG-CA | cCA/cTG | P/L | Unchanged |
| NUDT6 | 4-123843716-TGG-CGA | CcA/TcG | P/S | Unchanged |
| ANKRD50 | 4-125590478-TG-CA | cCA/cTG | P/L | Unchanged |
| HSPA4L | 4-128723042-TG-CA | tTG/tCA | L/S | Unchanged |
| LARP1B | 4-129100643-GT-AC | cGT/cAC | R/H | Unchanged |
| PCDH18 | 4-138442525-GGT-AGC | AcC/GcT | T/A | Unchanged |
| MAML3 | 4-140640621-GT-CA | gAC/gTG | D/V | Partially changed missense |
| KIAA0922 | 4-154479429-GT-AC | cGT/cAC | R/H | Unchanged |
| PLRG1 | 4-155461113-TTG-CTA | CaA/TaG | Q/* | Unchanged |
| PALLD | 4-169433326-TG-CA | aTG/aCA | M/T | Partially changed missense |
| TENM3 | 4-183652173-GAT-AAC | GaT/AaC | D/N | Unchanged |
| ENPP6 | 4-185012396-GCT-ACC | AgC/GgT | S/G | Unchanged |
| CCDC110 | 4-186379371-GT-AC | tAC/tGT | Y/C | Unchanged |
| CYP4V2 | 4-187122354-GT-AC | tGT/tAC | C/Y | Unchanged |
| FAT1 | 4-187557892-GT-AC | cAC/cGT | H/R | Unchanged |
| FAT1 | 4-187557893-TG-CA | CAc/TGc | H/C | Changed missense |
| SDHA | 5-228312-GAT-AAC | GaT/AaC | D/N | Unchanged |
| SDHA | 5-256509-GT-AC | GTc/ACc | V/T | Changed missense |
| SLC12A7 | 5-1063998-GT-AC | tAC/tGT | Y/C | Unchanged |
| CCT5 | 5-10256160-GT-AC | cGT/cAC | R/H | Unchanged |
| DNAH5 | 5-13701525-TG-CA | aCA/aTG | T/M | Changed missense |
| DNAH5 | 5-13811775-TG-CA | CAa/TGa | Q/* | Unchanged |
| DNAH5 | 5-13865980-TG-CA | aCA/aTG | T/M | Changed missense |
| DROSHA | 5-31423007-TG-CA | cCA/cTG | P/L | Unchanged |
| ADAMTS12 | 5-33614399-TG-CA | CAg/TGg | Q/W | Rescued nonsense |
| SLC45A2 | 5-33954511-TG-CA | aCA/aTG | T/M | Changed missense |
| EGFLAM | 5-38370537-TG-CA | TGg/CAg | W/Q | Rescued nonsense |
| MROH2B | 5-41000343-GT-AC | tAC/tGT | Y/C | Unchanged |
| MROH2B | 5-41049389-TG-CA | aCA/aTG | T/M | Changed missense |
| MROH2B | 5-41057374-TG-CA | CAg/TGg | Q/W | Rescued nonsense |
| ITGA2 | 5-52374657-GT-CA | GTg/CAg | V/Q | Changed missense |
| RP11-45H22.3 | 5-54252345-TG-CA | aCA/aTG | T/M | Changed missense |
| ADAMTS6 | 5-64748681-TG-CA | cCA/cTG | P/L | Unchanged |
| BDP1 | 5-70806958-GT-AC | GTg/ACg | V/T | Changed missense |
| TNPO1 | 5-72183986-TG-CA | gTG/gCA | V/A | Unchanged |
| ARHGEF28 | 5-73072354-TG-CA | TGg/CAg | W/Q | Rescued nonsense |
| ENC1 | 5-73931246-TG-CA | tCA/tTG | S/L | Unchanged |
| HEXB | 5-73981270-TG-CA | tTG/tCA | L/S | Unchanged |
| F2RL1 | 5-76128521-GT-AC | aGT/aAC | S/N | Unchanged |
| PJA2 | 5-108713982-TG-CA | gCA/gTG | A/V | Unchanged |
| PJA2 | 5-108714298-TG-CA | CAa/TGa | Q/* | Unchanged |
| TSSK1B | 5-112769739-GAT-CAA | AtC/TtG | I/L | Changed missense |
| AQPEP | 5-115298705-GT-CA | GTg/CAg | V/Q | Changed missense |
| CTXN3 | 5-126993248-TG-AC | gTG/gAC | V/D | Changed missense |
| RAPGEF6 | 5-130766662-TG-CA | CAg/TGg | Q/W | Rescued nonsense |
| CTC-432M15.3 | 5-130766662-TG-CA | CAg/TGg | Q/W | Rescued nonsense |
| IRF1 | 5-131822055-TG-CA | cCA/cTG | P/L | Unchanged |
| GDF9 | 5-132198199-GGT-AGC | AcC/GcT | T/A | Unchanged |
| SEC24A | 5-134032907-GT-CA | aGT/aCA | S/T | Partially changed missense |
| KDM3B | 5-137754694-GT-AC | gGT/gAC | G/D | Unchanged |
| TMEM173 | 5-138857919-TG-CA | CAt/TGt | H/C | Changed missense |
| WDR55 | 5-140048267-TG-CA | TGt/CAt | C/H | Changed missense |
| PCDHA1 | 5-140166017-GTT-ATC | GtT/AtC | V/I | Unchanged |
| PCDHA3 | 5-140181890-GCT-ACC | GcT/AcC | A/T | Unchanged |
| PCDHA8 | 5-140221139-GT-AC | aGT/aAC | S/N | Unchanged |
| PCDHA11 | 5-140250252-TTG-CTA | TtG/CtA | L | Unchanged |
| PCDHA13 | 5-140263420-TTG-CTA | TtG/CtA | L | Unchanged |
| PCDHA13 | 5-140263444-TTG-CTA | TtG/CtA | L | Unchanged |
| PCDHB3 | 5-140481840-GT-AC | cGT/cAC | R/H | Unchanged |
| PCDHB5 | 5-140517174-TCG-CCA | TcG/CcA | S/P | Unchanged |
| PCDHB8 | 5-140559101-GAT-AAC | GaT/AaC | D/N | Unchanged |
| PCDHB16 | 5-140563980-GGT-AGC | GgT/AgC | G/S | Unchanged |
| PCDHB10 | 5-140574355-GCT-ACC | GcT/AcC | A/T | Unchanged |
| PCDHGA11 | 5-140802839-TG-CA | cTG/cCA | L/P | Unchanged |
| PCDH12 | 5-141325249-TG-CA | cCA/cTG | P/L | Unchanged |
| SH3RF2 | 5-145439647-TG-CA | TGg/CAg | W/Q | Rescued nonsense |
| SPINK5 | 5-147510865-GT-AC | gGT/gAC | G/D | Unchanged |
| SH3TC2 | 5-148386525-TG-CA | cCA/cTG | P/L | Unchanged |
| TIGD6 | 5-149374932-TG-CA | CAg/TGg | Q/W | Rescued nonsense |
| CSF1R | 5-149450132-TG-CA | CAc/TGc | H/C | Changed missense |
| PDGFRB | 5-149495395-TG-CA | cCA/cTG | P/L | Unchanged |
| ARSI | 5-149677434-GT-AC | tAC/tGT | Y/C | Unchanged |
| FAT2 | 5-150946132-GAT-AAC | AtC/GtT | I/V | Unchanged |
| HAVCR1 | 5-156479539-GT-AC | ACa/GTa | T/V | Changed missense |
| THG1L | 5-157164962-TG-CA | cTG/cCA | L/P | Unchanged |
| CCNJL | 5-159686502-TG-CA | CAt/TGt | H/C | Changed missense |
| RARS | 5-167913510-GT-AC | GTa/ACa | V/T | Changed missense |
| STK10 | 5-171520554-TG-CA | cCA/cTG | P/L | Unchanged |
| SH3PXD2B | 5-171789779-GCT-ACC | AgC/GgT | S/G | Unchanged |
| AC027309.1 | 5-172036332-TG-CA | aCA/aTG | T/M | Changed missense |
| DRD1 | 5-174868840-TG-CA | tCA/tTG | S/L | Unchanged |
| CDHR2 | 5-176004476-TG-CA | gTG/gCA | V/A | Unchanged |
| B4GALT7 | 5-177031347-GT-AC | cGT/cAC | R/H | Unchanged |
| COL23A1 | 5-177683376-GT-AC | ACg/GTg | T/V | Changed missense |
| ZNF354B | 5-178293284-TGG-CGA | TgG/CgA | W/R | Rescued nonsense |
| AC136604.1 | 5-179078989-TG-CA | TGt/CAt | C/H | Changed missense |
| HUS1B | 6-656343-TG-CA | CAa/TGa | Q/* | Unchanged |
| PSMG4 | 6-3264487-TG-CA | TGg/CAg | W/Q | Rescued nonsense |
| SLC22A23 | 6-3287118-TG-CA | tCA/tTG | S/L | Unchanged |
| RPP40 | 6-4996265-TG-CA | aCA/aTG | T/M | Changed missense |
| MCUR1 | 6-13801614-GT-AC | ACt/GTt | T/V | Changed missense |
| MCUR1 | 6-13814338-GCT-ACC | AgC/GgT | S/G | Unchanged |
| GPLD1 | 6-24437445-GT-AC | ACa/GTa | T/V | Changed missense |
| HIST1H3C | 6-26045640-TG-CA | aTG/aCA | M/T | Unchanged |
| BTN2A1 | 6-26468434-TG-CA | cTG/cCA | L/P | Unchanged |
| GNL1 | 6-30515043-TG-CA | gCA/gTG | A/V | Unchanged |
| VARS2 | 6-30888161-TG-CA | TGg/CAg | W/Q | Rescued nonsense |
| MUC21 | 6-30955099-GT-AC | GTg/ACg | V/T | Changed missense |
| MUC22 | 6-30993738-TG-CA | aTG/aCA | M/T | Partially changed missense |
| MUC22 | 6-30994878-TG-CA | aTG/aCA | M/T | Partially changed missense |
| HLA-C | 6-31237771-GGT-AGC | AcC/GcT | T/A | Unchanged |
| HLA-B | 6-31324200-GCT-CCA | AgC/TgG | S/W | Changed missense |
| MICA | 6-31378358-TG-CA | TGg/CAg | W/Q | Rescued nonsense |
| MICA | 6-31379118-GT-AC | GTa/ACa | V/T | Changed missense |
| MICA | 6-31380194-TG-CA | TGt/CAt | C/H | Changed missense |
| PRRC2A | 6-31594626-GGT-CGA | GgT/CgA | G/R | Unchanged |
| ABHD16A | 6-31657413-TAG-CAA | CtA/TtG | L | Unchanged |
| HSPA1L | 6-31778272-GT-AC | ACg/GTg | T/V | Changed missense |
| SLC44A4 | 6-31838713-GT-AC | tAC/tGT | Y/C | Unchanged |
| NOTCH4 | 6-32188642-TG-CA | cCA/cTG | P/L | Unchanged |
| HLA-DRB5 | 6-32486437-TG-CA | CAg/TGg | Q/W | Rescued nonsense |
| HLA-DRB5 | 6-32487214-TCG-CCA | CgA/TgG | R/W | Rescued nonsense |
| HLA-DRB5 | 6-32487277-TG-CA | aCA/aTG | T/M | Changed missense |
| HLA-DRB5 | 6-32489731-GT-CA | tAC/tTG | Y/L | Rescued nonsense |
| HLA-DRB5 | 6-32489939-TG-CA | CAg/TGg | Q/W | Rescued nonsense |
| HLA-DQA1 | 6-32609105-GT-AC | tGT/tAC | C/Y | Unchanged |
| HLA-DQB1 | 6-32629129-TG-CA | CAg/TGg | Q/W | Rescued nonsense |
| TAP1 | 6-32814974-GT-AC | gAC/gGT | D/G | Unchanged |
| HLA-DPA1 | 6-33036959-GT-AC | aAC/aGT | N/S | Unchanged |
| HLA-DPA1 | 6-33037419-GT-AC | aAC/aGT | N/S | Unchanged |
| WDR46 | 6-33256470-GT-AC | ACc/GTc | T/V | Changed missense |
| TAPBP | 6-33272972-GT-AC | ACt/GTt | T/V | Changed missense |
| RPS10 | 6-34392586-TG-AC | CAg/GTg | Q/V | Changed missense |
| RPS10-NUDT3 | 6-34392586-TG-AC | CAg/GTg | Q/V | Changed missense |
| TCP11 | 6-35086275-TG-CA | CAg/TGg | Q/W | Rescued nonsense |
| PNPLA1 | 6-36275458-TCG-CCA | TcG/CcA | S/P | Unchanged |
| DNAH8 | 6-38750810-GGT-AGC | GgT/AgC | G/S | Unchanged |
| DNAH8 | 6-38976712-TG-CA | cTG/cCA | L/P | Unchanged |
| TREML4 | 6-41196605-TG-CA | TGg/CAg | W/Q | Rescued nonsense |
| TFEB | 6-41652604-TG-CA | cCA/cTG | P/L | Unchanged |
| TFEB | 6-41652604-TGG-CGA | CcA/TcG | P/S | Unchanged |
| CUL7 | 6-43014298-TTG-CTA | CaA/TaG | Q/* | Unchanged |
| CUL7 | 6-43014299-TG-CA | CAa/TGa | Q/* | Unchanged |
| DLK2 | 6-43418733-GT-AC | cAC/cGT | H/R | Unchanged |
| AARS2 | 6-44275009-GAT-AAC | AtC/GtT | I/V | Unchanged |
| SLC25A27 | 6-46623696-GCT-ACC | GcT/AcC | A/T | Unchanged |
| GPR116 | 6-46826844-TG-CA | aCA/aTG | T/M | Changed missense |
| GPR115 | 6-47684573-TG-CA | aTG/aCA | M/T | Partially changed missense |
| GLYATL3 | 6-49479750-TG-CA | aTG/aCA | M/T | Partially changed missense |
| PKHD1 | 6-51483961-TG-CA | CAa/TGa | Q/* | Unchanged |
| ICK | 6-52878637-TG-CA | cCA/cTG | P/L | Unchanged |
| KLHL31 | 6-53519855-TAG-CAA | CtA/TtG | L | Unchanged |
| GFRAL | 6-55266625-TCG-CCA | TcG/CcA | S/P | Unchanged |
| BMP5 | 6-55639028-GT-AC | aAC/aGT | N/S | Unchanged |
| RP11-257K9.8 | 6-73935134-TG-AC | aCA/aGT | T/S | Changed missense |
| IMPG1 | 6-76744342-TG-CA | CAg/TGg | Q/W | Rescued nonsense |
| SNAP91 | 6-84303342-TG-CA | cCA/cTG | P/L | Unchanged |
| ZNF292 | 6-87969480-GT-AC | GTa/ACa | V/T | Changed missense |
| MDN1 | 6-90482395-GAT-AAC | AtC/GtT | I/V | Unchanged |
| FAXC | 6-99771540-TG-CA | aCA/aTG | T/M | Changed missense |
| AIM1 | 6-106967778-TG-CA | TGc/CAc | C/H | Changed missense |
| PPIL6 | 6-109752450-GT-AC | cAC/cGT | H/R | Unchanged |
| MICAL1 | 6-109768295-GT-AC | tAC/tGT | Y/C | Unchanged |
| SLC22A16 | 6-110778128-TG-CA | CAt/TGt | H/C | Changed missense |
| PTPRK | 6-128404875-GAT-AAC | AtC/GtT | I/V | Unchanged |
| TMEM200A | 6-130761796-GCT-ACC | GcT/AcC | A/T | Unchanged |
| CTAGE9 | 6-132030028-TG-CA | aCA/aTG | T/M | Changed missense |
| ECT2L | 6-139170460-GT-AC | GTa/ACa | V/T | Changed missense |
| HIVEP2 | 6-143074700-TG-CA | cCA/cTG | P/L | Unchanged |
| ULBP1 | 6-150290446-TG-CA | aTG/aCA | M/T | Partially changed missense |
| IYD | 6-150716696-TG-CA | TGc/CAc | C/H | Changed missense |
| ESR1 | 6-152201874-GT-AC | cGT/cAC | R/H | Unchanged |
| SYNJ2 | 6-158497715-GTT-ATC | GtT/AtC | V/I | Unchanged |
| PLG | 6-161159625-GCT-ACC | GcT/AcC | A/T | Unchanged |
| PDE10A | 6-165895824-TG-CA | tCA/tTG | S/L | Unchanged |
| RPS6KA2 | 6-167271710-GT-AC | ACc/GTc | T/V | Changed missense |
| RP11-514O12.4 | 6-167271710-GT-AC | ACc/GTc | T/V | Changed missense |
| UNC93A | 6-167728774-TG-CA | aTG/aCA | M/T | Partially changed missense |
| THBS2 | 6-169648767-GT-AC | aAC/aGT | N/S | Unchanged |
| WDR27 | 6-169972595-GT-AC | cAC/cGT | H/R | Unchanged |
| WDR27 | 6-169972596-TG-CA | CAc/TGc | H/C | Changed missense |
| HEATR2 | 7-810218-GT-AC | GTg/ACg | V/T | Changed missense |
| TMEM184A | 7-1586660-GCT-ACC | AgC/GgT | S/G | Unchanged |
| SNX8 | 7-2303986-TG-CA | gCA/gTG | A/V | Unchanged |
| CARD11 | 7-2946461-TCG-CCA | CgA/TgG | R/W | Rescued nonsense |
| PAPOLB | 7-4900341-GCT-ACC | AgC/GgT | S/G | Unchanged |
| COL28A1 | 7-7413149-TG-CA | cCA/cTG | P/L | Unchanged |
| THSD7A | 7-11521542-TG-CA | cCA/cTG | P/L | Unchanged |
| THSD7A | 7-11581134-TG-CA | gCA/gTG | A/V | Unchanged |
| AGMO | 7-15458186-TG-CA | aCA/aTG | T/M | Changed missense |
| STEAP1B | 7-22533235-TG-CA | CAt/TGt | H/C | Changed missense |
| DFNA5 | 7-24742436-TG-CA | gCA/gTG | A/V | Unchanged |
| C7orf31 | 7-25181912-TG-CA | CAt/TGt | H/C | Changed missense |
| SCRN1 | 7-29966141-TG-CA | CAg/TGg | Q/W | Rescued nonsense |
| NME8 | 7-37907304-TG-CA | TGt/CAt | C/H | Changed missense |
| SPDYE1 | 7-44047066-TG-CA | TGc/CAc | C/H | Changed missense |
| MYO1G | 7-45004063-TG-CA | CAg/TGg | Q/W | Rescued nonsense |
| MYO1G | 7-45009723-GT-AC | aAC/aGT | N/S | Unchanged |
| NACAD | 7-45120248-GT-AC | aAC/aGT | N/S | Unchanged |
| PKD1L1 | 7-47869038-TG-CA | gCA/gTG | A/V | Unchanged |
| C7orf57 | 7-48086161-TG-CA | aTG/aCA | M/T | Partially changed missense |
| C7orf57 | 7-48092484-GAT-AAC | GaT/AaC | D/N | Unchanged |
| GRB10 | 7-50673029-TG-CA | gCA/gTG | A/V | Unchanged |
| ZNF479 | 7-57188526-TG-CA | CAc/TGc | H/C | Changed missense |
| ZNF680 | 7-64004108-TG-CA | CAg/TGg | Q/W | Rescued nonsense |
| ERV3-1 | 7-64452532-TG-CA | tCA/tTG | S/L | Unchanged |
| ERV3-1 | 7-64452541-GT-AC | cAC/cGT | H/R | Unchanged |
| MLXIPL | 7-73020301-TG-CA | tCA/tTG | S/L | Unchanged |
| WBSCR28 | 7-73279482-TG-CA | TGg/CAg | W/Q | Rescued nonsense |
| TRIM73 | 7-75028240-TG-CA | cTG/cCA | L/P | Unchanged |
| POM121C | 7-75051375-TG-CA | cCA/cTG | P/L | Unchanged |
| SRCRB4D | 7-76028057-GT-AC | ACg/GTg | T/V | Changed missense |
| ZP3 | 7-76069811-TCG-CCA | TcG/CcA | S/P | Unchanged |
| UPK3B | 7-76144560-TG-CA | TGg/CAg | W/Q | Rescued nonsense |
| UPK3B | 7-76144560-TGG-CGA | TgG/CgA | W/R | Rescued nonsense |
| SEMA3C | 7-80374438-TG-CA | cCA/cTG | P/L | Unchanged |
| SEMA3A | 7-83590852-TG-CA | aCA/aTG | T/M | Changed missense |
| C7orf63 | 7-89912301-GT-AC | GTg/ACg | V/T | Changed missense |
| KRIT1 | 7-91864193-TG-CA | cCA/cTG | P/L | Unchanged |
| MCM7 | 7-99693078-GAT-AAC | AtC/GtT | I/V | Unchanged |
| MEPCE | 7-100028483-GT-AC | aGT/aAC | S/N | Unchanged |
| ZAN | 7-100377082-TG-CA | cTG/cCA | L/P | Unchanged |
| ZAN | 7-100386900-TG-CA | TGg/CAg | W/Q | Rescued nonsense |
| MUC12 | 7-100634706-TCG-ACC | TcG/AcC | S/T | Unchanged |
| MUC12 | 7-100635940-TG-CA | aTG/aCA | M/T | Partially changed missense |
| MUC17 | 7-100676793-TG-CA | cTG/cCA | L/P | Unchanged |
| MUC17 | 7-100683929-GT-AC | GTc/ACc | V/T | Changed missense |
| MUC17 | 7-100684686-TG-CA | aTG/aCA | M/T | Partially changed missense |
| MYL10 | 7-101256833-TG-CA | gCA/gTG | A/V | Unchanged |
| FBXL13 | 7-102462636-TG-CA | gCA/gTG | A/V | Unchanged |
| FBXL13 | 7-102669807-GT-AC | ACt/GTt | T/V | Changed missense |
| NAMPT | 7-105903904-TG-CA | tCA/tTG | S/L | Unchanged |
| LAMB1 | 7-107593989-TG-CA | CAg/TGg | Q/W | Rescued nonsense |
| LAMB4 | 7-107738882-GT-AC | tAC/tGT | Y/C | Unchanged |
| LRRN3 | 7-110763561-GAT-AAC | GaT/AaC | D/N | Unchanged |
| SLC13A1 | 7-122809233-GT-AC | aAC/aGT | N/S | Unchanged |
| FLNC | 7-128487864-GAT-AAC | GaT/AaC | D/N | Unchanged |
| STRIP2 | 7-129107227-TG-CA | TGc/CAc | C/H | Changed missense |
| PODXL | 7-131190696-TG-CA | gCA/gTG | A/V | Unchanged |
| PLXNA4 | 7-131864591-TG-CA | gCA/gTG | A/V | Unchanged |
| CNOT4 | 7-135047703-TG-CA | aCA/aTG | T/M | Changed missense |
| NUP205 | 7-135269655-TG-CA | aTG/aCA | M/T | Partially changed missense |
| DGKI | 7-137150695-TG-CA | aCA/aTG | T/M | Changed missense |
| SVOPL | 7-138305806-TG-CA | gCA/gTG | A/V | Unchanged |
| KIAA1549 | 7-138596064-GT-AC | tAC/tGT | Y/C | Unchanged |
| DENND2A | 7-140258000-TG-CA | tCA/tTG | S/L | Unchanged |
| TAS2R38 | 7-141672602-GAT-AAC | AtC/GtT | I/V | Unchanged |
| TRBV5-6 | 7-142131851-TG-CA | gCA/gTG | A/V | Unchanged |
| TRPV5 | 7-142625249-TG-CA | aCA/aTG | T/M | Changed missense |
| TRPV5 | 7-142625882-GT-AC | tAC/tGT | Y/C | Unchanged |
| TAS2R60 | 7-143141474-GT-AC | cGT/cAC | R/H | Unchanged |
| FAM115C | 7-143417083-TG-CA | TGt/CAt | C/H | Changed missense |
| OR2A25 | 7-143771527-GT-AC | tGT/tAC | C/Y | Unchanged |
| ZNF212 | 7-148947470-TG-CA | aTG/aCA | M/T | Partially changed missense |
| ACTR3C | 7-149983565-TG-CA | CAg/TGg | Q/W | Rescued nonsense |
| RP1L1 | 8-10467627-TG-CA | aCA/aTG | T/M | Changed missense |
| RP1L1 | 8-10467628-GT-AC | ACa/GTa | T/V | Changed missense |
| RP1L1 | 8-10469340-GTT-ATC | AaC/GaT | N/D | Unchanged |
| FAM86B1 | 8-12044328-TG-CA | tCA/tTG | S/L | Unchanged |
| FAM86B2 | 8-12286609-TG-CA | tCA/tTG | S/L | Unchanged |
| CSGALNACT1 | 8-19316086-GT-AC | cAC/cGT | H/R | Unchanged |
| SLC39A14 | 8-22262321-TG-CA | cTG/cCA | L/P | Unchanged |
| ENTPD4 | 8-23291835-TG-CA | cCA/cTG | P/L | Unchanged |
| EBF2 | 8-25708267-TG-CA | tCA/tTG | S/L | Unchanged |
| NUGGC | 8-27918057-TG-CA | CAa/TGa | Q/* | Unchanged |
| NUGGC | 8-27925202-GCT-ACC | AgC/GgT | S/G | Unchanged |
| WRN | 8-31024654-TG-CA | TGt/CAt | C/H | Changed missense |
| RB1CC1 | 8-53569177-GT-CA | ACt/TGt | T/C | Changed missense |
| OPRK1 | 8-54142157-TG-CA | gCA/gTG | A/V | Unchanged |
| ADHFE1 | 8-67380528-TG-CA | TGt/CAt | C/H | Changed missense |
| CPA6 | 8-68346339-TG-CA | gCA/gTG | A/V | Unchanged |
| TRPA1 | 8-72936145-TG-CA | CAt/TGt | H/C | Changed missense |
| ZFHX4 | 8-77745633-TCG-CCA | TcG/CcA | S/P | Unchanged |
| NBN | 8-90958422-TG-CA | cCA/cTG | P/L | Unchanged |
| KIAA1429 | 8-95504024-TG-CA | CAg/TGg | Q/W | Rescued nonsense |
| KIAA1429 | 8-95531419-TTG-CTA | CaA/TaG | Q/* | Unchanged |
| CCNE2 | 8-95894448-GT-AC | ACt/GTt | T/V | Changed missense |
| SPAG1 | 8-101252680-TG-CA | aTG/aCA | M/T | Partially changed missense |
| LRP12 | 8-105511684-TG-CA | aCA/aTG | T/M | Changed missense |
| RP11-422N16.3 | 8-110657514-GT-AC | GTa/ACa | V/T | Changed missense |
| TAF2 | 8-120790304-TG-CA | aCA/aTG | T/M | Changed missense |
| DSCC1 | 8-120847188-TG-CA | CAt/TGt | H/C | Changed missense |
| TRMT12 | 8-125463250-TGG-CGA | TgG/CgA | W/R | Rescued nonsense |
| TG | 8-134108546-TG-CA | TGg/CAg | W/Q | Rescued nonsense |
| ST3GAL1 | 8-134488007-GGT-AGC | AcC/GcT | T/A | Unchanged |
| COL22A1 | 8-139697478-TG-CA | cCA/cTG | P/L | Unchanged |
| SLC45A4 | 8-142222443-GTT-ATC | AaC/GaT | N/D | Unchanged |
| SLC45A4 | 8-142228809-TG-CA | gCA/gTG | A/V | Unchanged |
| LYPD2 | 8-143832509-GT-AC | aAC/aGT | N/S | Unchanged |
| C8orf31 | 8-144124609-TG-CA | cTG/cCA | L/P | Unchanged |
| RHPN1 | 8-144462313-TG-CA | cTG/cCA | L/P | Unchanged |
| MROH6 | 8-144649625-TCG-CCA | CgA/TgG | R/W | Rescued nonsense |
| TIGD5 | 8-144680371-TGG-CGA | TgG/CgA | W/R | Rescued nonsense |
| SCRIB | 8-144874554-TG-CA | cCA/cTG | P/L | Unchanged |
| PLEC | 8-144992103-TG-CA | aCA/aTG | T/M | Changed missense |
| PLEC | 8-144992361-TG-CA | cCA/cTG | P/L | Unchanged |
| PLEC | 8-145001031-TG-CA | CAc/TGc | H/C | Changed missense |
| GPAA1 | 8-145138621-TG-CA | gTG/gCA | V/A | Unchanged |
| CYHR1 | 8-145689915-GT-AC | cAC/cGT | H/R | Unchanged |
| DMRT3 | 9-990712-TTG-CTA | TtG/CtA | L | Unchanged |
| PTPRD | 9-8518143-TG-CA | gCA/gTG | A/V | Unchanged |
| MPDZ | 9-13219570-TG-CA | aCA/aTG | T/M | Changed missense |
| SLC24A2 | 9-19622268-TG-CA | cCA/cTG | P/L | Unchanged |
| IFNA14 | 9-21239650-GTT-ATC | AaC/GaT | N/D | Unchanged |
| DDX58 | 9-32487521-TG-CA | aCA/aTG | T/M | Changed missense |
| FAM205A | 9-34724580-TG-CA | CAt/TGt | H/C | Changed missense |
| FAM205A | 9-34726418-TG-CA | cCA/cTG | P/L | Unchanged |
| PIGO | 9-35091950-GT-CA | ACa/TGa | T/* | Gained nonsense |
| OR13J1 | 9-35870000-GT-AC | cAC/cGT | H/R | Unchanged |
| OR13J1 | 9-35870001-TG-CA | CAc/TGc | H/C | Changed missense |
| PAX5 | 9-36840623-GT-AC | tAC/tGT | Y/C | Unchanged |
| FRMPD1 | 9-37740635-GCT-ACC | GcT/AcC | A/T | Unchanged |
| ALDH1B1 | 9-38396502-GT-AC | GTg/ACg | V/T | Changed missense |
| ANKRD18A | 9-38575611-TG-CA | aCA/aTG | T/M | Changed missense |
| FOXD4L6 | 9-69200917-GT-AC | cAC/cGT | H/R | Unchanged |
| FOXD4L5 | 9-70177441-GT-AC | tAC/tGT | Y/C | Unchanged |
| SMC5 | 9-72897440-TG-CA | TGt/CAt | C/H | Changed missense |
| PRUNE2 | 9-79324179-GT-AC | ACg/GTg | T/V | Changed missense |
| DAPK1 | 9-90322023-GT-AC | aGT/aAC | S/N | Unchanged |
| SHC3 | 9-91656963-TG-CA | cCA/cTG | P/L | Unchanged |
| NUTM2F | 9-97081356-TG-CA | aCA/aTG | T/M | Changed missense |
| PTCH1 | 9-98220526-GT-AC | aAC/aGT | N/S | Unchanged |
| TBC1D2 | 9-100971348-TG-CA | gCA/gTG | A/V | Unchanged |
| GRIN3A | 9-104449294-GT-AC | aAC/aGT | N/S | Unchanged |
| OR13C5 | 9-107361449-TAG-CAA | CtA/TtG | L | Unchanged |
| AKAP2 | 9-112900199-TG-CA | tTG/tCA | L/S | Unchanged |
| PALM2-AKAP2 | 9-112900199-TG-CA | tTG/tCA | L/S | Unchanged |
| SVEP1 | 9-113169630-TG-CA | gCA/gTG | A/V | Unchanged |
| C9orf84 | 9-114490308-TG-CA | CAt/TGt | H/C | Changed missense |
| C9orf147 | 9-115249262-TG-CA | cCA/cTG | P/L | Unchanged |
| RNF183 | 9-116060124-TG-CA | CAa/TGa | Q/* | Unchanged |
| DFNB31 | 9-117166338-GT-CA | cAC/cTG | H/L | Partially changed missense |
| TNFSF8 | 9-117666499-GT-AC | tAC/tGT | Y/C | Unchanged |
| TNC | 9-117804544-TG-CA | aCA/aTG | T/M | Changed missense |
| TNC | 9-117840328-GT-CA | aAC/aTG | N/M | Changed missense |
| TNC | 9-117846580-TG-CA | CAg/TGg | Q/W | Rescued nonsense |
| TNC | 9-117848394-TG-CA | CAg/TGg | Q/W | Rescued nonsense |
| ASTN2 | 9-119495697-TG-CA | cCA/cTG | P/L | Unchanged |
| ASTN2 | 9-120053776-TG-CA | gCA/gTG | A/V | Unchanged |
| OR1B1 | 9-125391677-TG-CA | aCA/aTG | T/M | Changed missense |
| OR1K1 | 9-125563212-TG-CA | TGg/CAg | W/Q | Rescued nonsense |
| CRB2 | 9-126133547-TG-CA | gTG/gCA | V/A | Unchanged |
| DENND1A | 9-126144758-TG-CA | tCA/tTG | S/L | Unchanged |
| LMX1B | 9-129455585-TCG-ACC | TcG/AcC | S/T | Unchanged |
| FAM129B | 9-130289485-GT-AC | tAC/tGT | Y/C | Unchanged |
| TBC1D13 | 9-131565554-TG-CA | gTG/gCA | V/A | Unchanged |
| LRRC8A | 9-131670918-GT-AC | cGT/cAC | R/H | Unchanged |
| USP20 | 9-132623866-GCT-ACC | GcT/AcC | A/T | Unchanged |
| PPAPDC3 | 9-134183502-GT-AC | cGT/cAC | R/H | Unchanged |
| PRRC2B | 9-134346314-GT-AC | cGT/cAC | R/H | Unchanged |
| PRRC2B | 9-134350647-TG-CA | aTG/aCA | M/T | Partially changed missense |
| DDX31 | 9-135470412-GAT-AAC | AtC/GtT | I/V | Unchanged |
| SURF6 | 9-136199466-GT-AC | ACg/GTg | T/V | Changed missense |
| COL5A1 | 9-137658303-GT-CA | GTc/CAc | V/H | Changed missense |
| FCN2 | 9-137775154-GT-AC | cGT/cAC | R/H | Unchanged |
| PPP1R26 | 9-138377657-TG-CA | aTG/aCA | M/T | Partially changed missense |
| OBP2A | 9-138440641-TG-CA | aTG/aCA | M/T | Partially changed missense |
| GLT6D1 | 9-138516189-GT-AC | cAC/cGT | H/R | Unchanged |
| UBAC1 | 9-138838140-TG-CA | gCA/gTG | A/V | Unchanged |
| QSOX2 | 9-139100805-TG-CA | cCA/cTG | P/L | Unchanged |
| CCDC183 | 9-139693596-TG-CA | aTG/aCA | M/T | Partially changed missense |
| RP11-216L13.17 | 9-139693596-TG-CA | aTG/aCA | M/T | Partially changed missense |
| CCDC183 | 9-139700605-TG-CA | TGg/CAg | W/Q | Rescued nonsense |
| ABCA2 | 9-139903219-GAT-CAA | AtC/TtG | I/L | Changed missense |
| CSF2RA | X-1419454-TG-CA | gTG/gCA | V/A | Unchanged |
| ASMTL | X-1554649-TG-CA | aCA/aTG | T/M | Changed missense |
| DHRSX | X-2139200-TG-CA | CAt/TGt | H/C | Changed missense |
| WWC3 | X-10085226-GT-AC | cGT/cAC | R/H | Unchanged |
| FTHL17 | X-31089712-TG-CA | CAg/TGg | Q/W | Rescued nonsense |
| FAM47B | X-34961339-TTG-CTA | TtG/CtA | L | Unchanged |
| FAAH2 | X-57405162-GT-AC | cGT/cAC | R/H | Unchanged |
| HEPH | X-65382685-TG-CA | gTG/gCA | V/A | Unchanged |
| ABCB7 | X-74284996-TG-CA | gCA/gTG | A/V | Unchanged |
| ZMAT1 | X-101138792-TG-CA | CAg/TGg | Q/W | Rescued nonsense |
| ATP1B4 | X-119500459-TG-CA | gTG/gCA | V/A | Unchanged |
| CT47B1 | X-120008979-TGG-CGA | CcA/TcG | P/S | Unchanged |
| IGSF1 | X-130420006-TG-CA | cCA/cTG | P/L | Unchanged |
| USP26 | X-132160161-TG-CA | cCA/cTG | P/L | Unchanged |
| FAM122C | X-133941714-GT-AC | aGT/aAC | S/N | Unchanged |
| MAP7D3 | X-135310785-TG-CA | CAa/TGa | Q/* | Unchanged |
| SPANXC | X-140335857-TGG-CGA | CcA/TcG | P/S | Unchanged |
| MAGEC3 | X-140985607-TG-CA | TGt/CAt | C/H | Changed missense |
| MAGEC1 | X-140993674-GTT-CTA | GtT/CtA | V/L | Unchanged |
| SLITRK2 | X-144905744-TCG-CCA | TcG/CcA | S/P | Unchanged |
| PNMA5 | X-152158979-TG-CA | cCA/cTG | P/L | Unchanged |
| PLXNB3 | X-153041544-TG-CA | aTG/aCA | M/T | Partially changed missense |
| IL9R | X-155239682-GT-AC | GTg/ACg | V/T | Changed missense |

TABLE L
List of Exemplary Cas9 or Cas12a Orthologs

| | UniProt or | |
|---|---|---|
| | GenBank | Nickase |
| | Accession | Mutations/Catalytic |
| Ortholog | Number | residues |
| S. pyogenes Cas9 | Q99ZW2.1 | D10A, E762A, H840A, |
| (SpCas9) | | N854A, N863A, D986A¹⁷ |
| S. aureus Cas9 | J7RUA5.1 | D10A and N580¹⁸ |
| (SaCas9) | | |
| S. thermophilus Cas9 | G3ECR1.2 | D31A and N891A¹⁹ |
| (St1Cas9) | | |
| S. pasteurianus Cas9 | BAK30384.1 | D10, H599* |
| (SpaCas9) | | |
| C. jejuni Cas9 | Q0P897.1 | D8A, H559A²⁰ |
| (CjCas9) | | |
| F. novicida Cas9 | A0Q5Y3.1 | D11, N995²¹ |
| (FnCas9) | | |
| P. lavamentivorans | A7HP89.1 | D8, H601* |
| Cas9 (PlCas9) | | |
| C. lari Cas9 (ClCas9) | G1UFN3.1 | D7, H567* |
| Pasteurella multocida | Q9CLT2.1 | |
| Cas9 | | |
| F. novicida Cpf1 | A0Q7Q2.1 | D917, E1006, D1255²¹ |
| (FnCpf1) | | |
| M. bovoculi Cpf1 | WP 052585281.1 | D986A** |
| (MbCpf1) | | |
| A. sp. BV3L6 Cpf1 | U2UMQ6.1 | D908, 993E, Q1226, D1263²³ |
| (AsCpf1) | | |
| L. bacterium N2006 | A0A182DWE3.1 | D832A²⁴ |
| (LbCpf1) | | |

*predicted based on UniRule annotation on the UniProt database.
**Unpublished but deposited at addgene by Ervin Welker: pTE4565 (Addgene plasmid # 88903)

TABLE M
List of Exemplary High Fidelity and/or PAM-relaxed RGN Orthologs

| Published HF/PAM-RGN | | |
|---|---|---|
| variants | PMID | Mutations* |
| S. pyogenes Cas9 | 26628643 | K810A/K1003A/R1060A (1.0); |
| (SpCas9) eSpCasS | | K848A/K1003A/R1060A(1.1) |
| S. pyogenes Cas9 | 29431739 | M495V/Y515N/K526E/R661Q; |
| (SpCas9) evoCas9 | | (M495V/Y515N/K526E/R661S; |
| | | M495V/Y515N/K526E/R661L) |
| S. pyogenes Cas9 | 26735016 | N497A/R661A/Q695A/Q926A |
| (SpCas9) HF1 | | |
| S. pyogenes Cas9 | 30082871 | R691A |
| (SpCas9) HiFi Cas9 | | |
| S. pyogenes Cas9 | 28931002 | N692A, M694A, Q695A, H698A |
| (SpCas9) HypaCas9 | | |
| S. pyogenes Cas9 | 30082838 | F539S, M763I, K890N |
| (SpCas9) Sniper-Cas9 | | |
| S. pyogenes Cas9 | 29512652 | A262T, R324L, S409I, E480K, E543D, |
| (SpCas9) xCas9 | | M694I, E1219V |
| S. pyogenes Cas9 | 30166441 | R1335V, L1111R, D1135V, G1218R, |
| (SpCas9) SpCas9-NG | | E1219F, A1322R, T1337R |
| S. pyogenes Cas9 | 26098369 | D1135V, R1335Q, T1337R; |
| (SpCas9) VQR/VRER | | D1135V/G1218R/R1335E/T1337R |
| S. aureus Cas9 | 26524662 | E782K/N968K/R1015H |
| (SaCas9)-KKH | | |
| enAsCas12a | USSN | One or more of: E174R, S170R, S542R, |
| | 15/960,271 | K548R, K548V, N551R, N552R, K607R, |
| | | K607H, e.g., E174R/S542R/K548R, |
| | | E174R/S542R/K607R, |
| | | E174R/S542R/K548V/N552R, |
| | | S170R/S542R/K548R, S170R/E174R, |
| | | E174R/S542R, S170R/S542R, |
| | | E174R/S542R/K548R/N551R, |
| | | E174R/S542R/K607H, |
| | | S170R/S542R/K607R, or |
| | | S170R/S542R/K548V/N552R |
| enAsCas12a-HF | USSN | One or more of: E174R, S542R, K548R, |
| | 15/960,271 | e.g., E174R/S542R/K548R, |
| | | E174R/S542R/K607R, |
| | | E174R/S542R/K548V/N552R, |
| | | S170R/S542R/K548R, S170R/E174R, |
| | | E174R/S542R, S170R/S542R, |
| | | E174R/S542R/K548R/N551R, |
| | | E174R/S542R/K607H, |
| | | S170R/S542R/K607R, or |
| | | S170R/S542R/K548V/N552R, with the |
| | | addition of one or more of: N282A, |
| | | T315A, N515A and K949A |
| enLbCas12a(HF) | USSN | One or more of T152R, T152K, D156R, |
| | 15/960,271 | D156K, Q529K, G532R, G532K, G532Q, |
| | | K538R, K538V, D541R, Y542R, M592A, |
| | | K595R, K595H, K595S or K595Q, e.g., |
| | | D156R/G532R/K538R, |
| | | D156R/G532R/K595R, |
| | | D156R/G532R/K538V/Y542R, |
| | | T152R/G532R/K538R, T152R/D156R, |
| | | D156R/G532R, T152R/G532R, |
| | | D156R/G532R/K538R/D541R, |
| | | D156R/G532R/K595H, |
| | | T152R/G532R/K595R, |
| | | T152R/G532R/K538V/Y542R, optionally |
| | | with the addition of one or more of: |
| | | N260A, N256A, K514A, D505A, K881A, |
| | | S286A, K272A, K897A |
| enFnCas12a(HF) | USSN | One or more of T177A, K180R, K180K, |
| | 15/960,271 | E184R, E184K, T604K, N607R, N607K, |
| | | N607Q, K613R, K613V, D616R, N617R, |
| | | M668A, K671R, K671H, K671S, or K671Q, |
| | | e.g., E184R/N607R/K613R, |
| | | E184R/N607R/K671R, |
| | | E184R/N607R/K613V/N617R, |
| | | K180R/N607R/K613R, K180R/E184R, |
| | | E184R/N607R, K180R/N607R, |
| | | E184R/N607R/K613R/D616R, |
| | | E184R/N607R/K671H, |
| | | K180R/N607R/K671R, |
| | | K180R/N607R/K613V/N617R, optionally |
| | | with the addition of one or more of: |
| | | N305A, N301A, K589A, N580A, K962A, |
| | | S334A, K320A, K978A |
| chimeric Cas9 | 30718489 | S. aureus Cas9 with PAM interaction |
| cCas9 | | domain from SaCas9 orthologues, |
| | | expands recognition and targetability |
| | | of NNVRRN, NNVACT, NNVATG, |
| | | NNVATT, NNVGCT, NNVGTG, and |
| | | NNVGTT PAM sequences |
| Streptococcus | doi: https://doi.org/10.1101/429654 | Recognizes 5′-NAA-3′ PAM |
| macacae (Smac) Cas9 | | |
| NCTC 11558 | | |
| Spy-mac Cas9, | doi: https://doi.org/10.1101/429654 | Recognizes 5′-NAA-3′ PAM |
| Smac-py Cas9 | | |
| N. meningitidis | 30581144 | Recognizes N₄CC PAM |
| Nme2Cas9 | | |
| SpG Cas9 | 32217751 | SpCas9 variant capable of targeting |
| (SEQ-ID 158) | | NGN PAMs |
| | | D1135L/S1136W/G1218K/E1219Q/ |
| | | R1335Q/T1337R |
| | | Also as SpG-HF1 in combination |
| | | with N497A/R661A/Q695A/Q926A |
| SpRY Cas9 | 32217751 | SpCas9 variant capable of targeting |
| (SEQ-ID 157) | | NRN > NYN PAMs |
| | | SpRY(A61R/L1111R/D1135L/S1136W/ |
| | | G1218K/E1219Q/N1317R/A1322R/ |
| | | R1333P/R1335Q/T1337R); also as |
| | | SpRY-HF1 in combination with |
| | | N497A/R661A/Q695A/Q926A |

*predicted based on UniRule annotation on the UniProt database.

TABLE N
Amino acid substitutions predicted to generate ABE variants
with reduced RNA editing. This table lists the residue changes
in either or both TadA domains of the TadA heterodimer (present
in e.g., ABE7.10) predicted to cause an RRE phenotype, next
to the reasoning behind the proposed changes.

| | |
|---|---|
| Residues to Change | Rationale |

| Wild type | Engineered | Protein | Binding |
|---|---|---|---|
| (WT) TadA | TadA | structure | prediction |
| S7 | S205 | | x |
| H8 | H206 | | x |
| E9 | E207 | | x |
| Y10 | Y208 | | x |
| W11 | W209 | | x |
| M12 | M210 | | x |
| R13 | R211 | x | x |
| H14 | H212 | | x |
| T17 | T215 | | x |
| K20 | K218 | x | x |
| R21 | R219 | x | x |
| W23 | R221 | x | |
| E25 | E223 | x | x |
| R26 | R224 | x | x |
| E27 | E225 | x | |
| V28 | V226 | x | x |
| P29 | P227 | | x |
| V30 | V228 | x | |
| G31 | G229 | | x |
| H36 | L234 | | x |
| N37 | N235 | | x |
| N38 | N236 | | x |
| N46 | N244 | x | |
| R47 | R245 | | x |
| P48 | A246 | x | |
| I49 | I247 | x | |
| G50 | G248 | | x |
| R51 | I249 | | x |
| H52 | H250 | | x |
| D53 | D251 | | x |
| P54 | P252 | | x |
| T55 | T253 | | x |
| A56 | A254 | x | |
| H57 | H255 | x | x |
| A58 | A256 | x | |
| E59 | E257 | x | |
| R64 | R262 | | x |
| Q65 | Q263 | | x |
| G67 | G265 | | x |
| L68 | L266 | | x |
| Q71 | Q269 | | x |
| N72 | N270 | | x |
| R74 | R272 | | x |
| I76 | I274 | | x |
| D77 | D275 | | x |
| Y81 | Y279 | | x |
| V82 | V280 | x | |
| T83 | T281 | | x |
| L84 | F282 | x | |
| E85 | E283 | x | |
| P86 | P284 | x | x |
| C87 | C285 | x | x |
| V88 | V286 | | x |
| M89 | M287 | | x |
| C90 | C288 | x | x |
| R98 | R296 | | x |
| G100 | G298 | | x |
| R101 | R299 | | x |
| A106 | V304 | x | |
| R107 | R305 | x | |
| D108 | N306 | x | |
| A109 | A307 | x | |
| K110 | K308 | x | |
| T111 | T309 | x | |
| D119 | D317 | | x |
| H122 | H320 | | x |
| H123 | Y321 | | x |
| P124 | P322 | | x |
| G125 | G323 | | x |
| M126 | M324 | | x |
| N127 | N325 | | x |
| H128 | H326 | | x |
| R129 | R327 | | x |
| V130 | V328 | | x |
| E131 | E329 | | x |
| I132 | I330 | | x |
| T133 | T331 | | x |
| E134 | E332 | | x |
| G135 | G333 | | x |
| L137 | L335 | | x |
| A138 | A336 | x | x |
| D139 | D337 | | x |
| E140 | E338 | | x |
| C141 | C339 | x | x |
| A142 | A340 | x | x |
| A143 | A341 | x | x |
| L144 | L342 | | x |
| L145 | L343 | x | x |
| S146 | C344 | x | |
| D147 | Y345 | | x |
| F148 | F346 | x | x |
| F149 | F347 | x | x |
| R150 | R348 | x | x |
| M151 | M349 | | x |
| R152 | P350 | x | x |
| R153 | R351 | x | |
| Q154 | Q352 | | x |
| E155 | V353 | x | x |
| I156 | F354 | | x |
| K157 | N355 | | x |
| K160 | K358 | | x |
| K161 | K359 | | x |

TABLE O
Amino acid residues whose mutation may be expected to
yield base editor RRE variants. These positions were
chosen based on a APOBEC1 structural model and RNA/DNA
binding predictions or based on previous description
in the literature as residues whose mutation reduced
the RNA editing or binding activities of isolated APOBEC1.

| Residue Change | Reasoning |
|---|---|
| E24, V25 | model & RNA binding prediction |
| R118, Y120, H121, R126 | model & RNA binding prediction |
| W224-K229 | model & RNA binding prediction |
| P168-I186 | model & RNA binding prediction |
| L173 + L180 | model & RNA binding prediction |
| R15, R16, R17, to K15-17 & A15-17 | Teng et al, J Lipid Research 1999 |
| Deletion E181-L210 | Teng et al, J Lipid Research 1999 |
| P190 + P191 | Teng et al, J Lipid Research 1999 |
| Deletion L210-K229 (C-terminal) | Teng et al, J Lipid Research 1999 |
| Deletion S2-L14 (N-terminal) | Teng et al, J Lipid Research 1999 |
| V64, F66 | Teng et al, J Lipid Research 1999 |
| L180A | Teng et al, J Lipid Research 1999 |
| C192, L193, L196, P201, L203, | Teng et al, J Lipid Research 1999 |
| L210, P219, P220 | |
| P92 | MacGinnitie et al, JBC 1995 |

TABLE P
Summed frequency (%) of alleles with concurrent A-to-G and C-
to-T SPACE editing of 4 replicates using 28 gRNAs (for FIG. 4)

| | Summed frequency (%) of alleles with concurrent | | | |
|---|---|---|---|---|
| | A-to-G and C-to-T SPACE editing | | | |
| | Rep. 1 | Rep. 2 | Rep. 3 | Rep. 4 |
| HEK site 2 (ABE | 68.7% | 64.1% | 57.0% | 55.3% |
| site 1) | | | | |
| ABE site 2 | 6.8% | 4.7% | 5.0% | 3.5% |
| ABE site 3 | 17.4% | 15.6% | 19.5% | 14.8% |
| ABE site 4 | 53.4% | 58.1% | 59.2% | 47.4% |
| ABE site 7 | 11.7% | 12.6% | 11.8% | 12.6% |
| ABE site 8 | 6.8% | 7.2% | 11.2% | 6.4% |
| ABE site 9 | 20.3% | 24.7% | 25.8% | 19.2% |
| ABE site 10 | 20.1% | 23.8% | 16.8% | 20.0% |
| ABE site 11 | 46.9% | 51.8% | 42.2% | 40.6% |
| ABE site 14 | 35.2% | 37.7% | 31.4% | 30.5% |
| ABE site 15 | 40.3% | 44.9% | 36.4% | 38.4% |
| ABE site 17 | 39.0% | 35.7% | 34.3% | 36.9% |
| ABE site 18 | 28.8% | 28.1% | 20.2% | 21.9% |
| ABE site 19 | 6.6% | 15.4% | 20.1% | 27.1% |
| EMX1 site 1 | 0.0% | 0.0% | 0.0% | 0.0% |
| EMX1 site 2 | 11.7% | 9.2% | 8.5% | 8.9% |
| FANCF site 1 | 5.0% | 5.5% | 4.7% | 4.4% |
| HEK site 3 | 16.9% | 14.5% | 14.5% | 18.4% |
| HEK site 4 | 24.8% | 39.9% | 37.2% | 31.5% |
| PDCD1 site 1 | 14.0% | 15.5% | 18.3% | 12.7% |
| PPP1R12C site 2 | 22.0% | 28.7% | 27.6% | 25.9% |
| PPP1R12C site 3 | 41.5% | 36.0% | 33.3% | 32.2% |
| PPP1R12C site 4 | 0.0% | 0.0% | 0.0% | 0.0% |
| PPP1R12C site 5 | 2.3% | 0.0% | 0.0% | 0.0% |
| PPP1R12C site 6 | 15.6% | 20.3% | 13.6% | 16.4% |
| PPP1R12C site 7 | 0.0% | 0.0% | 0.0% | 0.0% |
| RNF2 site 1 | 9.5% | 10.3% | 10.2% | 14.6% |
| VEGFA site 4 | 20.7% | 36.3% | 39.4% | 28.3% |

* only alleles with ≥1% frequency with edits in the editing window are counted

TABLE Q
RNA off-target editing induced by ABEmax, miniABEmax-V82G, Target-AID, and SPACE with
gRNAs targeting HEK site 2 and RNF2 site 1, determined by RNA-seq (for FIG. 11)

| | | | | | | | | | | | | Mean | Median |
|---|---|---|---|---|---|---|---|---|---|---|---|---|---|
| | | | | | | | | A-to-I | | C-to-U | | Editing | Editing |
| Cell | BE | gRNA | Sort | EJUL | | Replicate | A-to-I | (%) | C-to-U | (%) | Other | Efficiency | Efficiency |
| HEK293T | ABEmax | HEK | All | 289 | 5704 | Rep. 1 | 5,696 | 99.8% | 8 | 0.1% | 3 | 21.2 | 17.2 |
| | | site 2 | GFP | 290 | 3551 | Rep. 2 | 3,549 | 99.8% | 2 | 0.1% | 4 | 21.1 | 16.7 |
| | | (ABE | | 291 | 5172 | Rep. 3 | 5,168 | 99.9% | 4 | 0.1% | 3 | 20.6 | 16.7 |
| | | site 1) | | | | | | | | | | | |
| | miniABEmax- | HEK | All | 289 | 195 | Rep. 1 | 194 | 95.6% | 1 | 0.5% | 8 | 19.3 | 17.0 |
| | V82G | site 2 | GFP | 290 | 127 | Rep. 2 | 123 | 96.9% | 4 | 3.1% | 0 | 17.7 | 15.9 |
| | | (ABE | | 291 | 180 | Rep. 3 | 176 | 95.7% | 4 | 2.2% | 4 | 18.6 | 17.4 |
| | | site 1) | | | | | | | | | | | |
| | Target-AID | HEK | All | 289 | 11 | Rep. 1 | 5 | 20.0% | 6 | 24.0% | 14 | 14.9 | 9.5 |
| | | site 2 | GFP | 290 | 16 | Rep. 2 | 10 | 37.0% | 6 | 22.2% | 11 | 14.8 | 13.1 |
| | | (ABE | | 291 | 24 | Rep. 3 | 13 | 23.2% | 11 | 19.6% | 32 | 22.0 | 16.0 |
| | | site 1) | | | | | | | | | | | |
| | SPACE | HEK | All | 289 | 41 | Rep. 1 | 37 | 82.2% | 4 | 8.9% | 4 | 17.6 | 16.7 |
| | | site 2 | GFP | 290 | 29 | Rep. 2 | 26 | 81.3% | 3 | 9.4% | 3 | 16.6 | 15.4 |
| | | (ABE | | 291 | 23 | Rep. 3 | 20 | 76.9% | 3 | 11.5% | 3 | 18.3 | 18.5 |
| | | site 1) | | | | | | | | | | | |
| HEK293T | ABEmax | RNF2 | All | 292 | 3207 | Rep. 1 | 3,201 | 99.7% | 6 | 0.2% | 4 | 21.4 | 16.7 |
| | | site 1 | GFP | 293 | 3113 | Rep. 2 | 3,105 | 99.6% | 8 | 0.3% | 3 | 21.5 | 16.7 |
| | | | | 294 | 3997 | Rep. 3 | 3,993 | 99.7% | 4 | 0.1% | 10 | 22.0 | 17.3 |
| | miniABEmax- | RNF2 | All | 292 | 165 | Rep. 1 | 160 | 89.9% | 5 | 2.8% | 13 | 18.8 | 16.7 |
| | V82G | site 1 | GFP | 293 | 77 | Rep. 2 | 73 | 89.0% | 4 | 4.9% | 5 | 19.4 | 17.6 |
| | | | | 294 | 118 | Rep. 3 | 112 | 92.6% | 6 | 5.0% | 3 | 18.3 | 16.7 |
| | Target-AID | RNF2 | All | 292 | 25 | Rep. 1 | 17 | 38.6% | 8 | 18.2% | 19 | 19.8 | 15.0 |
| | | site 1 | GFP | 293 | 18 | Rep. 2 | 10 | 31.3% | 8 | 25.0% | 14 | 21.6 | 13.3 |
| | | | | 294 | 19 | Rep. 3 | 13 | 37.1% | 6 | 17.1% | 16 | 19.7 | 13.6 |
| | SPACE | RNF2 | All | 292 | 4 | Rep. 1 | 4 | 66.7% | 0 | 0.0% | 2 | 20.9 | 19.8 |
| | | site 1 | GFP | 293 | 26 | Rep. 2 | 22 | 68.8% | 4 | 12.5% | 6 | 19.7 | 17.1 |
| | | | | 294 | 25 | Rep. 3 | 21 | 65.6% | 4 | 12.5% | 7 | 17.4 | 16.7 |
| HEK293T | GFP only | — | All | 289 | 10 | Rep. 1 | 9 | 75.0% | 1 | 8.3% | 2 | 19.2 | 19.7 |
| | | | GFP | 290 | 10 | Rep. 2 | 7 | 63.6% | 3 | 27.3% | 1 | 18.5 | 17.3 |
| | | | | 291 | 13 | Rep. 3 | 12 | 85.7% | 1 | 7.1% | 1 | 18.6 | 16.7 |

### EXAMPLES

[0118] The invention is further described in the following examples, which do not limit the scope of the invention described in the claims.

### Methods

### Molecular Cloning

[0119] Constructs were cloned into the CMV from ABEmax-P2A-EGFP-NLS (Agel/Notl digest; Addgene #112101) or into the CAG backbone from SQT817 (Agel/Notl/EcoRV digest; Addgene #53373). All constructs with P2A-EGFP were cloned using either P2A-EGFP-NLS from ABEmax-P2A-EGFP-NLS or P2A-EGFP from BPK4335 serving as the template. SPACE was cloned using Gibson assembly with bpNLS-TadA7.10 (V82G)-SpCas9 (D10A)-bpNLS from miniABEmax-V82G (Addgene #131313), pmCDA1 from Target-AID (Addgene #131300), and dual UGIs from BE4max (Addgene #112093). All guide RNA plasmids were cloned by ligation into the pUC19-based entry vector BPK1520 (Bsmbl digest; Addgene #65777). All plasmids were midi or maxi prepped with the Qiagen Midi/Maxi Plus kits.

### Guide RNAs

[0120] All gRNAs were of the form 5′-NNNNNNNNNNNNNNNNNNNNCGTTTTAGAGCTAGAAATAGCAAGTTAAAATA AGGCTAGTCCGTTATCAACTTGAAAAAGTGGCACCGAGTCGGTGCTTTTTTT-3′. (SEQ ID NO: 169)

TABLE R
Shown below are the protospacer regions
(NNNNNNNNNNNNNNNNNNNN) for these gRNAs (all written 5′ to 3′).

| target gene/site | protospacer sequence | |
|---|---|---|
| ABE site 2 | GAGTATGAGGCATAGACTGC | SEQ ID NO: |
| | | 170 |
| ABE site 3 | GTCAAGAAAGCAGAGACTGC | SEQ ID NO: |
| | | 171 |
| ABE site 4 | GAGCAAAGAGAATAGACTGT | SEQ ID NO: |
| | | 172 |
| ABE site 7 | GAATACTAAGCATAGACTCC | SEQ ID NO: |
| | | 173 |
| ABE site 8 | GTAAACAAAGCATAGACTGA | SEQ ID NO: |
| | | 174 |
| ABE site 9 | GAAGACCAAGGATAGACTGC | SEQ ID NO: |
| | | 175 |
| ABE site 10 | GAACATAAAGAATAGAATGA | SEQ ID NO: |
| | | 176 |
| ABE site 11 | GGACAGGCAGCATAGACTGT | SEQ ID NO. |
| | | 177 |
| ABE site 14 | GGCTAAAGACCATAGACTGT | SEQ ID NO: |
| | | 178 |
| ABE site 15 | GTCTAGAAAGCTTAGACTGC | SEQ ID NO: |
| | | 179 |
| ABE site 17 | GACAAAGAGGAAGAGAGACG | SEQ ID NO: |
| | | 180 |
| ABE site 18 | ACACACACACTTAGAATCTG | SEQ ID NO: |
| | | 181 |
| ABE site 19 | CACACACACTTAGAATCTGT | SEQ ID NO: |
| | | 182 |
| EMX1 site 1 | GAGTCCGAGCAGAAGAAGAA | SEQ ID NO: |
| | | 183 |
| EMX1 site 2 | GTATTCACCTGAAAGTGTGC | SEQ ID NO: |
| | | 184 |
| FANCF site 1 | GGAATCCCTTCTGCAGCACC | SEQ ID NO: |
| | | 185 |
| HEK site 2 | GAACACAAAGCATAGACTGC | SEQ ID NO: |
| (ABE site 1) | | 186 |
| HEK site 3 | GGCCCAGACTGAGCACGTGA | SEQ ID NO: |
| | | 187 |
| HEK site 4 | GGCACTGCGGCTGGAGGTGG | SEQ ID NO: |
| | | 188 |
| PDCD1 site 1 | GCGTGACTTCCACATGAGCG | SEQ ID NO: |
| | | 189 |
| PPP1R12C site 2 | GGCACTCGGGGGCGAGAGGA | SEQ ID NO: |
| | | 190 |
| PPP1R12C site 3 | GAGCTCACTGAACGCTGGCA | SEQ ID NO: |
| | | 191 |
| PPP1R12C site 4 | GACCCTCAGCCGTGCTGCTC | SEQ ID NO: |
| | | 192 |
| PPP1R12C site 5 | GCTGACTCAGAGACCCTGAG | SEQ ID NO: |
| | | 193 |
| PPP1R12C site 6 | GGGGCTCAACATCGGAAGAG | SEQ ID NO: |
| | | 194 |
| PPP1R12C site 7 | GCTGGCTCAGGTTCAGGAGA | SEQ ID NO: |
| | | 195 |
| RNF2 site 1 | GTCATCTTAGTCATTACCTG | SEQ ID NO: |
| | | 196 |
| VEGFA site 4 | GAGGACGTGTGTGTCTGTGT | SEQ ID NO: |
| | | 197 |

### DNA Off-Targets Sites

TABLE S
Shown below are the sequences (NNNNNNNNNNNNNNNNNNNN) for
these off-target sites (all written 5' to 3').

| target site | sequence | |
|---|---|---|
| HEK site 2 off 1 | GAACACAATGCATAGATTGC | SEQ ID NO: |
| | | 198 |
| HEK site 2 off 2 | AAACATAAAGCATAGACTGC | SEQ ID NO: |
| | | 199 |
| HEK site 3 off 1 | CACCCAGACTGAGCACGTGC | SEQ ID NO: |
| | | 200 |
| HEK site 3 off 2 | GACACAGACTGGGCACGTGA | SEQ ID NO: |
| | | 201 |
| HEK site 3 off 3 | AGCTCAGACTGAGCAAGTGA | SEQ ID NO: |
| | | 202 |
| HEK site 3 off 4 | AGACCAGACTGAGCAAGAGA | SEQ ID NO: |
| | | 203 |
| HEK site 3 off 5 | GAGCCAGAATGAGCACGTGA | SEQ ID NO: |
| | | 204 |
| HEK site 4 off 1 | TGCACTGCGGCCGGAGGAGG | SEQ ID NO: |
| | | 205 |
| HEK site 4 off 2 | GGCTCTGCGGCTGGAGGGGG | SEQ ID NO: |
| | | 206 |
| HEK site 4 off 3 | GGCACGACGGCTGGAGGTGG | SEQ ID NO: |
| | | 207 |
| HEK site 4 off 4 | GGCATCACGGCTGGAGGTGG | SEQ ID NO: |
| | | 208 |
| HEK site 4 off 5 | GGCGCTGCGGCGGGAGGTGG | SEQ ID NO: |
| | | 209 |
| EMX1 site 1 off 1 | GAGTCTAAGCAGAAGAAGAA | SEQ ID NO: |
| | | 210 |
| EMX1 site 1 off 2 | GAGGCCGAGCAGAAGAAAGA | SEQ ID NO: |
| | | 211 |
| EMX1 site 1 off 3 | GAGTCCTAGCAGGAGAAGAA | SEQ ID NO: |
| | | 212 |
| EMX1 site 1 off 4 | GAGTCCGGGAAGGAGAAGAA | SEQ ID NO: |
| | | 213 |
| EMX1 site 1 off 5 | GAGCCGGAGCAGAAGAAGGA | SEQ ID NO: |
| | | 214 |
| FANCF site 1 off 1 | GGAACCCCGTCTGCAGCACC | SEQ ID NO: |
| | | 215 |
| FANCF site 1 off 2 | GGAGTCCCTCCTACAGCACC | SEQ ID NO: |
| | | 216 |
| FANCF site 1 off 3 | AGAGGCCCCTCTGCAGCACC | SEQ ID NO: |
| | | 217 |
| FANCF site 1 off 4 | ACCATCCCTCCTGCAGCACC | SEQ ID NO: |
| | | 218 |
| FANCF site 1 off 5 | GGATTGCCATCCGCAGCACC | SEQ ID NO: |
| | | 219 |
| FANCF site 1 off 6 | TGAATCCCATCTCCAGCACC | SEQ ID NO: |
| | | 220 |

### Cell Culture and Transfections

[0122] HEK293T cells (CRL-3216, ATCC) were grown in culture using Dulbeccos Modified Medium (Gibco) supplemented with 10% FBS (Gibco) and 1% penicillin-streptomycin solution (Gibco). Cells were passaged at ˜80% confluency every 2-3 days to maintain an actively growing population. Cells were passaged at ˜80% confluency every 4 days. Cells were used for experiments until passage 20, and were tested for mycoplasma every 4 weeks.
For DNA on-target experiments with 28 gRNAs, 1.25×10⁴ HEK293T cells were seeded into 96-well Flat Bottom cell culture plates (Corning), transfected 24 h post-seeding with 30 ng base editor or control, 10 ng gRNA, and 0.3 μL TransIT-X2 (Mirus), and harvested 72 h after transfection to obtain genomic DNA (gDNA). For DNA off-target experiments, 6.25×10⁴ HEK293T cells were seeded into 24-well cell culture plates (Corning), transfected 24 h post seeding with 150 ng base editor or control, 50 ng gRNA, and 1.5 μL TransIT-X2, and harvested 72 h after transfection to obtain gDNA. For RNA off-target experiments, 6.5×10⁶ HEK293T cells were seeded into 150 mm cell culture dishes (Corning), transfected 24 h post-seeding with 37.5 μg base editor or control, 12.5 μg gRNA, and 150 μL TransIT-293 (Mirus), and sorted 36-40 h after transfection. For co-expression of miniABEmax-V82G and Target-AID (ABE & CBE mix) vs SPACE experiments, 1.25×10⁴ HEK293T cells were seeded into 96-well cell culture plates, transfected 24 h post-seeding with 15 ng miniABEmax-V82G and 15 ng Target-AID for ABE & CBE mix, and 30 ng for both SPACE and the nCas9 control, 10 ng gRNA, and 0.3 μL TransIT-X2, and harvested 72 h after transfection to obtain gDNA. e.g.,

### FACS & RNA/DNA Harvest for RNA-Seq Experiments

[0123] Sorting of negative control and BE expressing cells as well as RNA/DNA harvest was carried out on the same day. Cells were sorted on a BD FACSARIAII 36-40h after transfection. We gated on the cell population on forward/sideward scatter after exclusion of doublets. We then sorted all GFP-positive cells and/or top 5% of cells with the highest FITC signal into pre-chilled 100% FBS and 5% of mean fluorescence intensity (MFI)-matched cells for nCas9-NLS negative controls, matching the MFI/GeoMean of top 5% of ABE or ABEmax-transfected cells. We used MFI-matching for these controls, as the bpNLS-32AAlinker-nCas9-bpNLS-P2A-EGFP (control) plasmid was smaller than ABEmax-P2A-EGFP—due to the lack of the TadA-TadA* heterodimer—and thus yielded higher transfection efficiency and overall higher FITC signal. After sorting, cells were spun down, lysed using DNA lysis buffer (Laird et al, 1991) with DTT and Proteinase K or RNA lysis buffer (Macherey-Nagel). gDNA was extracted using magnetic beads (made from FisherSci Sera-Mag SpeedBeads Carboxyl Magnetic Beads, hydrophobic according to Rohland & Reich, 2012), after overnight lysis. RNA then was extracted with Macherey-Nagel's NudeoSpin RNA Plus kit.

### High-Throughput Amplicon Sequencing & Base Editing Data Analysis

[0124] Genomic DNA was amplified using gene-specific DNA primers flanking desired target sequence. These primers included illumina-compatible adapter-flaps. The amplicons were molecularly indexed with NEBNext Dual Index Primers (NEB) or index primers with the same or similar sequence ordered from IDT. Samples were combined into libraries and sequenced on the Illumina MiSeq machine using the MiSeq Reagent Kit v2 or Micro Kit v2 (Illumina). Sequencing results were analyzed using a batch version of the software CRISPResso 2.0 (crispresso.rocks).

### RNA-Seq and Single Nucleotide Variant Calling

[0125] RNA library preparation was performed using Illumina's TruSeq Stranded Total RNA Gold Kit with initial input of ˜500 ng of extracted RNA per sample, using SuperScript 111 for first-strand synthesis (Thermo Fisher). rRNA depletion was confirmed during library preparation by fluorometric quantitation using the Qubit HS RNA kit before and after depletion (Thermo Fisher). For indexing, we used IDT-Illumina Unique Dual Indeces (Illumina). Libraries were pooled based on qPCR quantification (NEBNext Library Quant Kit for Illumina) and loaded onto a NextSeq (at MGH Cancer Center, PE 2x150, 500/550 MidOutput Cartridge) or HiSeq2500 in High Output mode (Broad Institute, PE 2x76). Illumina fastq sequencing reads were aligned to the human hg38 reference genome with STAR (Dobin et al., 2013, PMID: 23104886) and processed with GATK best practices (McKenna et al., 2010, PMID: 20644199: DePristo et al., 2011, PMID: 21478889). RNA variants were called using HaplotypeCaller, and empirical editing efficiencies were established on PCR-de-duplicated alignment data. Variant loci in ABE/ABEmax overexpression experiments were further required to have comparable read coverage in the corresponding control experiment (read coverage for SNV in control >90th percentile of read coverage across all SNVs in overexpression). Additionally, the above loci were required to have a consensus of at least 99% of reads calling the reference allele in control.

### Analysis of Potential Targets for the Correction or Generation of Multi-Nucleotide Variants (MNVs) by SPACE

[0126] A list of multi-nucleotide variants (MNVs) was obtained from Wang et. al. “Landscape of multi-nucleotide variants in 125,748 human exomes and 15,708 genomes” (pre-print at dx.doi.org/10.1101/573378; data file at storage.googleapis.com/gnomad-public/release/2.1/mnv/gnomad_mnv_coding.tsv). These were filtered to detect disease correcting or disease generating modifications enabled by SPACE, which are defined as annotated MNVs with a nearby PAM. Disease correcting conversions are defined as having targetable Cs and As in the ALT position with matching Ts and Gs in the REF position; whereas disease generating conversions are defined as the reverse scenario, with targetable Cs and As in the REF position with matching Ts and Gs in the ALT position. Patterns for selected disease correcting MNV codons include “GNT>ANC”, “GTN>ACN”, “NGT>NAC”, “NTG>NCA”, “TGN>CAN”, and “TNG>CNA”; whereas patterns for disease generating include “ACN>GTN”, “ANC>GNT”, “CAN>TGN”, “CNA>TNG”, “NAC>NGT”, and “NCA>NTG”. PAMs considered include NGG, NGA, and NG.

### Example 1. SPACE Induces Efficient Simultaneous C-to-T and A-to-G Editing in Human HEK293T Cells

[0127] Human HEK293T cells were transfected with plasmids encoding nCas9, miniABEmax-V82G, Target-AID and SPACE constructs (e.g., SEQ IDs 140-144; FIG. 1) and gRNAs targeting several genomic sites (e.g., SEQ ID 145-152). After 72 hours, gDNA was extracted and targeted amplicon sequencing was performed to determine the on-target DNA editing of SPACE constructs. On all genomic sites tested, efficient DNA base editing was detected by targeted deep sequencing on a MiSeq next-generation sequencing (NGS) device and both types expected substitutions, C-to-T as well as A-to-G were detected across the target sites tested, predominantly in positions 2-11 (FIGS. 2 and 3; with 1 being the most PAM-distal). Both types of edits were detected on a single allele in a substantial fraction of alleles, e.g., on HEK site 2 (FIG. 4). These data indicate that bifunctional adenine and cytosine base editing (BACE) can be performed using a single nCas9 fused to a dual-deaminase system. In this experiment, TadA*-V82G was fused to the N-terminus of nCas9 (D10A) and pmCDA1 was fused to the C-terminus, while 2 UGIs were fused C-terminal of pmCDA1. The constructs also contained two bipartite NLSs in order to enhance nuclear localization of the fusion proteins.

### Example 2. SPACE Editing Analysis, mRNA and RNP Production and Testing

[0128] Guide RNAs will be tested to determine how different sequence contexts might affect SPACE editing in two cell lines, as well as using SPACE mRNAs (produced via IVT or by TriLink) to electroporate primary human CD34+ and T cells. SPACE constructs will be subcloned into pET vectors with an N-terminal 6xHis-tag and codon-optimized for expression in E. coli to enable protein purification. RNPs will be electroporated with a Lonza device into HEK293T and primary human T cells.

### Example 3. SPACE Induces Reduced Indels and Higher Product Purity with Two Fused UGIs in Human Cells Compared to SPACEΔUGI

[0129] To determine if the UGIs play a vital role in maintaining product purity in the context of SPACE, i.e. enabling high C-to-T and A-to-G editing yield without C-to-N, A-to-N, or indel byproducts, human HEK293T cells were transfected with SPACEΔUGI. NGS results indicated that SPACE constructs—that contain two UGIs—showed substantially reduced base editing byproducts, e.g., markedly decreased rates of C-to-G edits and indels (FIGS. 2, 4, 5, and 6).

### Example 4. SPACE was Engineered Using Deaminase Components that Exhibit Reduced Off-Target RNA Editing

[0130] We have recently described RNA off-target editing induced by DNA base editors (Grunewald et al, Nature 2019). In order to reduce the potential RNA off-target editing of SPACE, we fused miniABEmax-V82G and pmCDA1, two deaminase domains with markedly reduced or undetectable RNA off-target editing respectively (FIGS. 1 and 11).

### Example 5. Evaluation of RNA Off-Target Editing Induced by SPACE

[0131] Unbiased detection of RNA off-target editing with the help of RNA-seq was assessed by transfecting cells with two different gRNAs and SPACE constructs that were co-translationally expressed with P2A-EGFP in 15 cm dishes and trypsinized 36 hours post-transfection. Subsequently, GFP+ cells were sorted on a BD FACSAria II and lysed to harvest both DNA and RNA. After efficient on-target editing was confirmed via targeted amplicon sequencing, RNA-seq was performed using a TruSeq stranded total RNA library prep and sequencing on a NextSeq 500 machine at the MGH.
To characterize the transcriptome-wide RNA off-target activity of SPACE, we performed RNA-seq from HEK293T cells co-expressing SPACE with a gRNA targeting HEK site 2 or RNF2 site 1. We also performed matched side-by-side RNA-seq experiments with HEK293T cells expressing miniABEmax-V82G, Target-AID, ABEmax (a positive control for RNA editing), and GFP (a negative control). Analysis of on-target DNA editing in the cells used for RNA-seq showed efficient editing with SPACE, miniABEmax-V82G, and Target-AID with both gRNAs. As expected, GFP negative control experiments showed very few RNA C-to-U edits (range of 1-3) and A-to-I edits (range of 7-12) while ABEmax induced relatively high numbers of A-to-I edits (range of 3,105-5,696), miniABEmax-V82G induced low numbers of A-to-I edits (range of 73-194), and Target-AID induced even lower numbers of C-to-U edits (range of 6-11). Cells expressing SPACE showed very few C-to-U edits (range of 0-4) and only small numbers of A-to-I edits (range of 4-37) edits. The generally lower numbers of RNA edits we observed in our current experiments relative to previously published studies are due to reduced sequencing depth we used here (˜14-18 million reads/sample) compared with our earlier work (^{˜}80-120 million reads/sample). Based on these results, we conclude that SPACE retains the reduced RNA-editing activities observed with miniABEmax-V82G and Target-AID, inducing very low numbers of unwanted RNA edits throughout the transcriptome (FIG. 11).

### Example 6. Evaluation of DNA Off-Target Editing Induced by SPACE

[0132] Cas9-dependent DNA off-target effects induced by SPACE were assessed by transfecting cells with HEK site 2, 3, and 4 as well as FANCF site 1 and EMX1 site 1 gRNAs. 23 genomic sites that have previously been described as known off-target sites for said gRNAs¹⁵ were sequenced with NGS to detect potential off-target base editing of SPACE constructs. Cas9-dependent DNA off-target effects observed with SPACE were comparable or lower relative to those observed with miniABEmax-V82G or Target-AID for 17 of these 23 off-target sites (FIG. 7).

### Example 7. SPACE Outperforms the Parallel Expression of Separate ABE & CBE Constructs

[0133] To test whether SPACE is more efficient at inducing dual edits than the combined effects of separate adenine and cytosine base editors, we also performed experiments in HEK293T cells in which we directly compared SPACE with co-expressed miniABEmax-V82G and Target-AID (“ABE & CBE mix”) for each of the 28 gRNAs. For 22 of the 28 gRNAs, the summed frequency of dual edited on-target alleles was higher with SPACE than with the “ABE & CBE mix”. Interestingly, the summed frequencies of on-target alleles harboring only A-to-G edits was higher with the “ABE & CBE mix” condition than with SPACE for 21 of these same 22 gRNAs whereas the summed frequencies of on-target alleles with only C-to-T edits was higher with SPACE than with the “ABE & CBE mix” for 16 of the 22 gRNAs. Unwanted indels induced by SPACE (range: 0.02-7.1%, mean: 1.44%) were lower or comparable to those observed with the “ABE & CBE mix” (range: 0.13-11.92%, mean: 2.88%) at 27 out of 28 sites tested. Although we cannot rule out that differences in the architecture of SPACE, miniABEmax-V82G, and Target-AID may affect their expression levels and/or activities, our results demonstrate that SPACE generally yields higher frequencies of dual-edited alleles and lower frequencies of indels at on-target sites compared to co-expression of standard editors harboring the same adenosine and cytidine deaminases individually (FIGS. 9 and 10).

### Example 8. New and/or Unique Codon and Amino Acid Modifications Enabled by SPACE

[0134] SPACE adds 60 additional codon changes (resulting in 18 amino acid substitutions) that cannot be created with existing single-action CBEs and ABEs (FIG. 12, Table D).

### Example 9. Using SPACE to Model and Correct Multi-Nucleotide Variants (MNVs) as Well as for Targeted Sequence Diversification

[0135] SPACE could be useful for creating or reverting multi-nucleotide variants (MNVs), a newly emerging category of sequence variants associated with disease (also see: https://www.biorxiv.org/content/10.1101/573378v1) (Tables E-M). Notably, among MNVs, TG-to-CA and CA-to-TG (both inducible by SPACE) are the most frequent consecutively arising adjacent dinucleotide MNVs (Kaplanis et al, Genome Res 2019). Furthermore, the greater combinatorial diversity of mutations that result with SPACE as compared with single-deaminase base editors could make it attractive for molecular recording systems (e.g., lineage tracing; McKenna et al, Science 2016) as well as for saturation mutagenesis screens, directed evolution, and protein engineering (Canver et al, Nature 2015; Hess et al, Nat Methods 2016).

### Example 10: Using SPACE to Induce Saturated Mutagenesis for Targeted Sequence Diversification

[0136] SPACE could be used for introducing A>G, T>C (A>G on the other strand), C>T, or G>A (C>T on the other strand) for every nucleotide available across a coding/non-coding region to generate a comprehensive library. This can enable high-throughput saturation mutagenesis screening and highly complex genotype-phenotype correlation to study a protein or gene of interest.

### REFERENCES

[0137] 1. Komor, A. C., Kim, B., Packer, M. S., Zuris, J. A. & Liu, D. R. Programmable editing of a target base in genomic DNA without double-stranded DNA cleavage SUPPLEMENTS. Nature (2016). doi:10.1038/nature
[0138] 2. Nishida, K. et al. Targeted nucleotide editing using hybrid prokaryotic and vertebrate adaptive immune systems. Science (80-). (2016). doi:10.1126/science.aaf8729
[0139] 3. Gaudelli, N. M. et al. Programmable base editing of A•T to G•C in genomic DNA without DNA cleavage. Nature 1-27 (2017). doi:10.1038/nature24644
[0140] 4. Rees, H. A. & Liu, D. R. Base editing: precision chemistry on the genome and transcriptome of living cells. Nat. Rev. Genet. (2018). doi:10.1038/s41576-018-0059-1
[0141] 5. Grunewald, J. et al. Transcriptome-wide off-target RNA editing induced by CRISPR-guided DNA base editors. Nature (2019). doi:10.1038/s41586-019-1161-z
[0142] 6. Zhou, C. et al. Off-target RNA mutation induced by DNA base editing and its elimination by mutagenesis. Nature (2019). doi:10.1038/s41586-019-1314-0
[0143] 7. Rees, H. A., Wilson, C., Doman, J. L. & Liu, D. R. Analysis and minimization of cellular RNA editing by DNA adenine base editors SUPPLEMENT. Sci. Adv. 5, (2019).
[0144] 8. Koblan, L. W. et al. Improving cytidine and adenine base editors by expression optimization and ancestral reconstruction. Nat. Biotechnol. (2018). doi:10.1038/nbt.4172
[0145] 9. Thuronyi, B. W. et al. Continuous evolution of base editors with expanded target compatibility and improved activity. Nat. Biotechnol. (2019). doi:10.1038/s41587-019-0193-0
[0146] 10. Komor, A. C. et al. Improved base excision repair inhibition and bacteriophage Mu Gam protein yields C: G-to-T: A base editors with higher efficiency and product purity. Sci. Adv. 1-10 (2017).
[0147] 11. Kim, Y. B. et al. Increasing the genome-targeting scope and precision of base editing with engineered Cas9-cytidine deaminase fusions. Nat. Biotechnol. (2017). doi:10.1038/nbt.3803
[0148] 12. Gehrke, J. M. et al. An APOBEC3A-Cas9 base editor with minimized bystander and off-target activities. Nat. Biotechnol. (2018). doi:10.1038/nbt.4199
[0149] 13. Wang, X. et al. Efficient base editing in methylated regions with a human APOBEC3A-Cas9 fusion. Nat. Biotechnol. 36, (2018).
[0150] 14. Grünewald, J. et al. Transcriptome-wide off-target RNA editing induced by CRISPR-guided DNA base editors (AAP). Nature (2019). doi:10.1038/s41586-019-1161-z
[0151] 15. Tsai, S. Q. et al. GUIDE-seq enables genome-wide profiling of off-target cleavage by CRISPR-Cas nucleases. 1-3 (2014). doi:10.1038/nbt.3117

EXEMPLARY SEQUENCES

SEQ ID NO: 1
>tr|G3U0R4|G3U0R4_LOXAF Apolipoprotein B mRNA editing enzyme catalytic
subunit 1 OS = Loxodonta africana = African elephant OX = 9785 GN = APOBEC1
PE = 4 SV = 1
FRRRIKPWEFEIFFDPRQLRKETCLLYEIMIGTSHKVWRNSGQNTTKHVEVNFI
EKFTSERKLCPSISCSITWFLSWSPCVVECSKAIREFLRQHPNVTLVIYVARLFHH
MDQRNRQGLKDLILSGITVQIMRVSEYHHCWRNFVSYSPGEETYWPRYPPLW
MMMYALELHCIILSLPPCLKISRRCQHQLTLFSLTPQKCHYQMIPPYILLATGLIEP
PMTWR
SEQ ID NO: 2
>tr|A0A0M3N0G8|A0A0M3N0G8_PROAN APOBEC-1 OS = Protopterus
annectens OX = 7888 PE = 2 SV = 1
MVQKRTSASKTRMTKKVLLSEYQKFYYSPRTCIGYVIQYDEDNVIFQNWICNKR
TTHAELQCIYEIKQNSLIKRFTPCTLKWYMSWTPCSECANEIIRFLNKFCQVKLEI
CAARIYFHKKKDNRRALRNLVKAGVKLTTMRWKDYKSMWRRFGTGEEIKKYEF
FEKSSDHKSVNWRVVTLKKILKEKDRDSDLENALSLLKI
SEQ ID NO: 3
>tr|A0A151P6M4|A0A151P6M4_ALLMI C->U-editing enzyme APOBEC-1
OS = Alligator mississippiensis OX = 8496 GN = APOBEC1A PE = 4 SV = 1
MAVEEEKGLLGTSQGWKIELKDFQENYMPSTWPKVTHLLYEIRWGKGSKVWR
NWCSNTLTQHAEVNCLENAFGKLQFNPPVPCHITWFLSWSPCCQCCRRILQFL
RAHSHITLVIKAAQLFKHMDERNRQGLRDLVQSGVHVQVMDLPDYRYCWRTFV
SHPHEGEGDFWPWFFPLWITFYTLELQHILLQQHALSYNL
SEQ ID NO: 4
>tr|F1CGT0|F1CGT0_ANOCA Apolipoprotein B mRNA-editing enzyme 1a
isoform (Fragment) OS = Anolis carolinensis OX = 28377 PE = 2 SV = 1
KAAILLSNLFFRWQMEPEAFQRNFDPREFPECTLLLYEIHWDNNTSRNWCTNK
PGLHAEENFLQIFNEKIDIKQDTPCSITWFLSWSPCYPCSQAIIKFLEAHPNVSLEI
KAARLYMHQIDCNKEGLRNLGRNRVSIMNLPDYRHCWITFVVPRGANEDYWP
QDFLPAITNYSRELDSILQD
SEQ ID NO: 5
>tr|A0A091EQ78|A0A091EQ78_CORBR C->U-editing enzyme APOBEC-1
(Fragment) OS = Corvus brachyrhynchos OX = 85066 GN = N302_10757 PE = 4
SV = 1
RWKIEPGDFQINYSPSQHRRGVYLLYEIRWRRGSIWRNWCSNTHRQHAEVNF
LENCFKDRPQVPCSITWFLSASPCGKCSKRILEFLKSRPYVTLKIYAAKLFRHHD
IRNREGLCNLGMHGVTIHIMNLEDYSYCWRNFVVY
SEQ ID NO: 6
>tr|A0A091IIG0|A0A091IIG0_CALAN C->U-editing enzyme APOBEC-1
(Fragment) OS = Calypte anna OX = 9244 GN = N300_12023 PE = 4 SV = 1
RWKIQPNDFKRNYQPGRRPNVVYLLYEIRWRRGTIWRNWCSNEFPQHAEDNF
FQNRFNAVPSVSCSITWFLSTTPCGRCSKRILEFLRLHPNVTLKIYAARLFRHLD
NRNRQGLRKLASNGVIIQIMGLPDYSYSWKKFVAY
SEQ ID NO: 7
>tr|A0A2U4ALA1|A0A2U4ALA1_TURTR C->U-editing enzyme APOBEC-1
isoform X1 OS = Tursiops truncatus OX = 9739 GN = APOBEC1 PE = 4 SV = 1
MIICWSTGPSAGDATLRRRIEPWEFEVSFDPRELSKETRLLYEIKWGKSQRIWR
HSGKNTTKHVERNFIEQITSERRFHRSVSCCIIWFLSWSPCWECSEAIREFLKQ
HPRVTLLIYVARLFQHMDPRNRQGLRDLTHSGVTIQIMGPTEYDYCWRYFVNY
APGKEAHWPRYPPLLMKLYALELHCIILGLPPCLNISRYQNQLTLFRPILRNCHY
QMIPPHILLHTGLIQLPLTWR
SEQ ID NO: 8
>tr|A0A093FY71|A0A093FY71_TYTAL C->U-editing enzyme APOBEC-1
(Fragment) OS = Tyto alba OX = 56313 GN = N341_11998 PE = 4 SV = 1
RWKIQPNDFKRNFLPGQHPKVVYLMYEIRWIRGTAWRSWCSNNSKQDAEVNL
LENCFKAMPSVFCSVTWVLFTTPCGKCFRRILEFLRVHSNVALERYAAQLFRHL
DICNWQGIRSLAMNGVIIHIMNLADYSYCWKRFVAY
SEQ ID NO: 9
>tr|L5KGJ8|L5KGJ8_PTEAL C->U-editing enzyme APOBEC-1 OS = Pteropus
alecto OX = 9402 GN = PAL_GLEAN10015600 PE = 4 SV = 1
MWVLFDILISWSTGPSTGDPTLRRRIEPWEFEVFFDPRELRKEACLLYEIQWGT
SHKIWRNSGKNTTKHVELNFIEKFTSERHFCSSVSCSIIWFLSWSPCWECSKAI
REFLSORPTVTLVIFVSRLFQHMDQQNRQGLRDLINSGVTIQIMRASEYDHCWR
NFVNYPPGKEAHWPRYPPLWIVIKLYALELHCIILSLPPCVMISRRCQKQLTLFTLI
LKKCHYQMIPAHILLATGLIQVPVTWR
SEQ ID NO: 10
>tr|A0A2K6KS69|A0A2K6KS69_RHIBE CMP/dCMP-type deaminase domain-
containing protein OS = Rhinopithecus bieti OX = 61621 GN = APOBEC1
PE = 4 SV = 1
MTSEKGPSTGDPURRRIEPWEFDIFYDPRELRKEACLLYEIKWGMSWKIWRS
SGKNTTNHVEVNFIEKFTSERRFHSSISCSITWFLSWSPCWDCSQAIRKFLSQH
PGVTLVIYVARLFWHTDQQNRQGLRDLVNSGVTIQMMTASEYYHCWRNFVNY
PPGEEAHWPRYPPLWMMLYALELHCIILSLPPCLKISRRWQNHLTFFRLHLQNC
HYQTIPPHILLATGLIQPSVTWR
SEQ ID NO: 11
>tr|A0A2Y9NGP5|A0A2Y9NGP5_DELLE C->U-editing enzyme APOBEC-1
isoform X1 OS = Delphinapterus leucas OX = 9749 GN = APOBEC1 PE = 4 SV = 1
MIICWSTGPSAGDATSRRRIEPWEFEVSFDPRELCKETRLLYEIKWGKSQHVW
RHSDKNTTKHVECKFIEKITSERHFHPSVSCCIIWFLSWSPCWECSKAIREFLNQ
HPRVTLFIYVARLFQHMDPQNRQGLRDLIHSGVTIHVMGPTEYDYCWRNFVNY
PPGKEAHWPRYPPMLMKLYALELHCIILGLPPCLNISRYQNQLTLFRLIPQNCHY
RMIPPHILLHRGLIRLPLTWR
SEQ ID NO: 12
>tr|A0A218ULD2|A0A218ULD2_9PASE C->U-editing enzyme APOBEC-1
OS = Lonchura striata domestica OX = 299123 GN = APOBEC1 PE = 4 SV = 1
MYRRKMRGMYISKRALRKHFDPRNYPRETYLLCELQWRGSHKSWQHWLRND
DSKDCHAEKYFLEEIFEPRSYNICDMTWYLSWSPCGECCDIIQDFLEEQPNVNI
NIRIARLYYADRASNRRGLMELANSPGVSIEIMDADDYNDCWETFIQPGVYYRF
SPENFESAIRRNCSQLEDILQGLHL
SEQ ID NO: 13
>tr|A0A0Q3WRD0|A0A0Q3WRD0_AMAAE C->U-editing enzyme APOBEC-1
OS = Amazona aesfiva OX = 12930 GN = AAES_27783 PE = 4 SV = 1
MLPAPAPVPLVLPLQGGGVVVVTVGVXPTALLQPSGAPEVARTFVGAVIAFVIA
EYVDTSVSEDTTICGMYIPKEALKYHFDPREVXRDTYLLCILRWGETGTPWSHW
VKNYRYHAEVYFLEKIFQTRKSSKNINCSITWYLSWSPCAKCCRKILNFLKKHSY
VSIKIHVARLFRIDDKETXQNLKNLGSLVGVTVSVMEXEDYTNCWKTFIRGHAD
GDSWIDDLKSEIRKNRLKFQGIFKDLPHQTEDVDFWLILAANPGPAWFSFSGYT
GWAVASKAPSLLSPLSCLTRLLTP
SEQ ID NO: 14
>tr|A0A2K6U925|A0A2K6U925_SAIBB Apolipoprotein B mRNA editing enzyme
catalytic subunit 1 OS = Saimiri boliviensis boliviensis OX = 39432
GN = APOBEC1 PE = 4 SV = 1
MTSERRRIEPWEFSISYDPRELCKETCLLYEIKWGMSWKIWRSSGKNTTNHVE
VNFIEKFTSERHFHSSVSCSITWFLSWSPCWECSQAIREFLSQHPGVTLVIYVA
RLFQHMDQQNRQGLRELVNSGVTIQIMTASEYYHCWRNFVNYPPGEEAHWPR
HPPLWMMLYALELHCIIL
SEQ ID NO: 15
>tr|A0A2R9A0R0|A0A2R9A0R0_PANPA CMP/dCMP-type deaminase domain-
containing protein OS = Pan paniscus OX = 9597 GN = APOBEC1 PE = 4 SV = 1
ISWSTGPSTGDPTLRRRIEPWEFDVFYDPRELRKEACLLYEIKWGMSRKIWRSS
ERDFHPSISCSIPATLSWSPCWECSQAIREFLSQHPGVTLVIYVARLFWHMDQ
QNRQGLRDLVNSGVTIQIMTASEYYHCWRNFVNYPPGDEAHWPQYPPLWMM
LYALELHCIILSLPPCLKISRRWQNHLTFFSLHLQNCHYQTIPPHILLATGLIHPSV
AWR
SEQ ID NO: 16
>sp|Q694B3|ABEC1_PONPY C->U-editing enzyme APOBEC-1 OS = Pongo
pygmaeus OX = 9600 GN = APOBEC1 PE = 3 SV = 2
MTSEKGPSTGDPTLRRRIESWEFDVFYDPRELRKETCLLYEIKWGMSRKIWRS
SGKNTTNHVEVNFIKKFTSERRFHSSISCSITWFLSWSPCWECSQAIREFLSQH
PGVTLVIYVARLFWHMDQRNRQGLRDLVNSGVTIQIMRASEYYHCWRNFVNYP
PGDEAHWPQYPPLWMMLYALELHCIILSLPPCLKISRRWQNHLAFFRLHLQNC
HYQTIPPHILLATGLIHPSVTWR
SEQ ID NO: 17
>tr|E1BP99|E1BP99_BOVIN Apolipoprotein B mRNA editing enzyme catalytic
subunit 1 OS = Bos taurus OX = 9913 GN = APOBEC1 PE = 4 SV = 1
MASDRGPPAGDPTLRRRIEPWEFEFSFDPRKFCKEACLLYEIQWGNNRDVWR
HSGKNTTKHVERNFIEKIASERYFCPSIRCFIFWYLSWSPCWECSKAIREFLNQH
PNVTLVIYIARLFQHMDPQNRQGLKDLVQSGVTIQVMRAPEYEYCWRNFVNYP
RGKEAHWPRYPPLWMNLYALELYCIILGLPPCLHISRRYQNQLIVFRLTLQNCHY
QMIPPYILLATGMVQLPMTWR
SEQ ID NO: 18
>tr|S7PYX0|S7PYX0_MYOBR C->U-editing enzyme APOBEC-1 OS = Myotis
brandtii OX = 109478 GN = D623_10002956 PE = 4 SV = 1
MDEQNRQGLRDLIKSGVTVQIMTTPEYDYCWRNFVNYPPGKDTHCPMYPPLW
MKLYALELHCIILSLPPCLMISRRCQKQLTWYRLNLQNCHYQQIPHHILLATVWI
SEQ ID NO: 19
>tr|M3WB96|M3WB96_FELCA Apolipoprotein B mRNA editing enzyme catalytic
subunit 1 OS = Felis catus OX = 9685 GN = APOBEC1 PE = 4 SV = 2
MASDKGPSAGDATLRRRIEPREFEVFFDPRELRKEACLLYEIKWGTSHRIWRNS
GRNTANHVELNFIEKFTSERHFCPSVSCSITWFLSWSPCWECSKAIRGFLSQHP
SVTLVIYVSRLFWHLDQQNRQGLRDLVNSGVTVQIMRVPEYDHCWRNFVNYP
PGEEDHWPRYPVVWMKLYALELHCIILSLPPCLKILRRCQNQLTLFRLTLQNCH
YQMIPPHILLATGLIQLPVTWR
SEQ ID NO: 20
>tr|A0A2K5PZC0|A0A2K5PZC0_CEBCA CMP/dCMP-type deaminase domain
containing protein OS = Cebus capucinus imitator OX = 1737458 GN = APOBEC1
PE = 4 SV = 1
MTSERGPSTGDPTLRRRIEPWEFYISYDPKELCKETCLLYEIKWGMSWKIWRS
SGKNTTNHVEVNFIEKFTSERRFHSSISCSITWFLSWSPCWECSQAIREFLSQH
PGVTLVIYVARLFQHMDQQNROGLRDLVNSGVTIQIMRASEYYYCWRNFVNYP
PGEEAHWPRHPPLWMMLYALELHCIILGLPPCLKISRRRQNRLTFFRLHLQNCH
YQMIPPHILLAAGLIQPSVTWR
SEQ ID NO: 21
>tr|H2Q5C6|H2Q5C6_PANTR Apolipoprotein B mRNA editing enzyme catalytic
subunit 1 OS = Pan troglodytes OX = 9598 GN = APOBEC1 PE = 4 SV = 1
MTSEKGPSTGDPTLRRRIEPWEFDVFYDPRELRKEACLLYEIKWGMSRKIWRS
SGKNTTNHVEVNFIKKFTSERHFHPSISCSITWFLSWSPCWECSQAIREFLSQH
PGVTLVIYVARLFWHMDQQNRQGLRDLVNSGVTIQIMRASEYYHCWRNFVNYP
PGDEAHWPQYPPLWMMLYAL
ELHCIILSLPPCLKISRRWQNHLTFFSLHLONCHYQTIPPHILLATGLIHPSVAWR
SEQ ID NO: 22
>tr|A0A1U7S7K7|A0A1U757K7_ALLSI C->U-editing enzyme APOBEC-1-like
OS = Alligator sinensis OX = 38654 GN = LOC102373005 PE = 4 SV = 1
MGEHWQYAGSGEYIPQDQFEENFDPSVLLAETHLLSELTWGGRPYKHWYENT
EHCHAEIHFLENFSSKNRSCTITWYLSWSPCAECSARIADFMQENTNVKLNIHV
ARLYLHDDEHTROGLRYLMKMKRVTIQVMTIPDYTYCWNTFLEDDGEDESDDY
GGYAGVHEDEDESDDDDYLPTHFAPWIMLYSLELSCILQGFAPCLKIIQGNHMS
PTFQLHVQDQEQKRLLEPANPWGAD
SEQ ID NO: 23
>tr|G31IS7|G3I1S7_CRIGR C->U-editing enzyme APOBEC-1 OS = Cricetulus
griseus OX = 10029 GN = I79_017346 PE = 4 SV = 1
MTEQEYCYCWRNFVNYPPSNEVYWPRYPNVWMRMYALELYCIVLGLPPCLKII
RRHQHPLTFFTLHLQSCHYQRIPPHILWATGLV
SEQ ID NO: 24
>tr|A0A094MFH1|A0A094MFH1_ANTCR C->U-editing enzyme APOBEC-1
(Fragment) OS = Antrostomus carolinensis OX = 279965 GN = N321_09417
PE = 4 SV = 1
RWKMQPNDFKRNYLPVQYPNMVYLLYEIRWSTGTIWRNWCSNNSTQHAEVNF
LENRFNSRPSVSCSITWVLSTTPCGKCSTKILEFLRLHPNVTLKIYAAKLFKHLDI
RNRQGLRNLAMNGVIIRIMNLADYSYCWKTFVAY
SEQ ID NO: 25
>tr|A0A2K6EVT9|A0A2K6EVT9_PROCO CMP/dCMP-type deaminase domain-
containing protein OS = Propithecus coquereli OX = 379532 GN = APOBEC1
PE = 4 SV = 1
MTSEKRRIEPWEFEAFFDPRELRKEACLLYEIKWGASHKIWRNTGKSTTRHVEV
NFIEKFTSERRSDSLISCSITWFLSWSPCWECSKAIREFLSQHPNVTLVIYVARLF
WHMNQQNRQGLRDLINSGVTVQIMGVSEYCHCWRNFVNYPPGKEASCPTYP
PLWMTLYALELHCIILSLPPCLKISRRCQNQLTFFRLTPQN0HYQTIPPHILLATG
LIQPSVPAIR
SEQ ID NO: 26
>tr|G8F4P7|G8F4P7_MACFA C->U-editing enzyme APOBE0-1 (Fragment)
OS = Macaca fascicularis OX = 9541 GN = EGM_20518 PE = 4 SV = 1
GPSTGDPTLRRRIEPWEFDIFYDPRELRKEACLLYEIKWGMSPKIWRSSGKNTT
NHVEVNFIEKLTSERRFHSSISCSITWFLSWSPCWECSQAIREFLSQHPGVTLVI
YVARLFWHTDQQNRQGLRDLVNSGVTIQIMRASEYYHCWRNFVNYPPGEEAH
WPRYPPLWMMLYALELHCIILSLPPCLKISRRWQNHLTFFRLHLQNCHYQMIPP
HILLATGLIQPSVTWR
SEQ ID NO: 27
>tr|A0A091V7F8|A0A091V7F8_NIPNI C->U-editing enzyme APOBEC-1
(Fragment) OS = Nipponia nippon OX = 128390 GN = Y956_13652 PE = 4
SV = 1
RWKIQPNDFRSNYLPCQHPRVVYLLYEIRWSRGTIWRNWCSNNSTQHAEVNF
LENCFKAMPSVPCSITWVLSTTPCGKCSRRILEFLRVHPNVTLEIYAAKLFKHLDI
RNRQGLRNLAKNGVVIRIMKLADYSYWWKRFVAY
SEQ ID NO: 28
>tr|A0A091SSF0|A0A091SSF0_PELCR C->U-editing enzyme APOBEC-1
(Fragment) OS = Pelecanus crispus OX = 36300 GN = N334_11718
PE = 4 SV = 1
RWKLQPEDFKRNYLPGQHPKVVYLLYEIRWSRGTIWRSWCSNNSKQHAEVNF
LENCFKARPSVSCSITWVLSTTPCGKCSRRILEFLRVHPNVTLEIYAAKLFKHLDI
RNQQGLRNLAWINGVIIRIMNLADYSYCWKRFVAH
SEQ ID NO: 29
>tr|A0A091CVE5|A0A091CVE5_FUKDA C->U-editing enzyme APOBEC-1
OS = Fukomys damarensis OX = 885580 GN = H920_16562 PE = 4 SV = 1
MSDPEFCHCWRNFVNYPPGQEARWPRFPPVWTMLYTLELCCVLLNLPPCLKI
SRRCHNQLAFFQLNLQNCHYRAIPPAVLFAVGLIHPFVAWA
SEQ ID NO: 30
>tr|L5LUG3|L5LUG3_MYODS C->U-editing enzyme APOBEC-1 OS = Myotis
davidii OX = 225400 GN = MDA_GLEAN10003736 PE = 4 SV = 1
MASDAGKMDRGPVSFIVLKSVETLCVRRIEPWEFEAIFDPRELRKEACLLYEIK
WGTGHKIWRHSGKNTTRHVEVNFIEKITSERQFCSSTSCSIIWFLSWSPCWEC
SKAITEFLRQRPGVTLVIYVARLYHHIVIDEQNRQGLRDLVKSGVTVQIMTTPEYD
YCWRNFVNYPPGKDTHCPIYPPLLIVIKLYALELHCIILSLPPCLMISRRCQKQLTW
YRLNLQNCHYQQIPHHILLATAWI
SEQ ID NO: 31
>tr|F1PUJ5|F1PUJ5_CANLF Apolipoprotein B mRNA editing enzyme catalytic
subunit 1 OS = Canis lupus familiaris OX = 9615 GN = APOBEC1 PE = 4 SV = 2
MASDKGPSAGDATLRRRIEPWEFEGFFDPRELRKETCLLYEIQWGTSHKTWRN
SGKNTTNHVEINFMEKFAAERQYCPSIRCSITWFLSWSPCWECSNAIRGFLSQ
HPSVTLVIYVARLFWHTDPQNRQGLRDLINSGVTIQIMTVPEYDHCWRNFVNYP
PGKEDHWPRYPVLWMKLYALELHCIILNLPPCLKISRRNQHQLTLFRLTLQDCH
YQTIPPPILLDMGLIQPLVTWR
SEQ ID NO: 32
>tr|A0A093GVH6|A0A093GVH6_DRYPU C->U-editing enzyme APOBEC-1
(Fragment) OS = Dryobates pubescens OX = 118200 GN = N307_04563 PE = 4
SV = 1
RWKIHPDEFKLNYVPVGRPRVVYLLYEIRWSRGSIWRNWCSNSSTQHAEVNFL
ENCFKAMPSVSCSITWFLSTTPCGNCSRRILEFLRAHPKVTLAIHAAKLFKHLDV
RNRHGLKALATDGVVLHIMSIADYRYCWTKFVAY
SEQ ID NO: 33
>tr|A0A2K5Z8Y4|A0A2K5Z8Y4_MANLE CMP/dCMP-type deaminase domain
containing protein OS = Mandrillus leucophaeus OX = 9568 GN = APOBEC1
PE = 4 SV = 1
MTSEKGPSTGDPTLRRRIEPWEFDIFYDPRELRKEACLLYEIKWGMSPKIWRSS
GKNTTNHVEVNFIEKLTSERRFHSSISCSITWFLSWSPCWECSQAIREFLSQHP
GVTLVIYVARLFWHTDQQNRQGLRDLVNSGVTIQIMRASEYYHCWRNFVNYPP
GEEAHWPRYPPLWMMLYALELHCIILSLPPCLKISRRQQNHLTFFRLHLQNCHY
QTIPPHILLATGLIQPSVTWR
SEQ ID NO: 34
>tr|A0A087VMP5|A0A087VMP5_BALRE C->U-editing enzyme APOBEC-1
(Fragment) OS = Balearica regulorum gibbericeps OX = 100784 GN = N312_10691
PE = 4 SV = 1
RWKIQPDDFKRNYLPGKHPRVVYLLYEIRWSRGTIWRSWCSNNATQHAEINFL
ETCFLARTSVSCSITWVLSTTPCGKCSRRILEFLNAYPNVTLEIYAAKLFRHLDN
RNRQGLRNLAMKGVRIHIMNLADYSYFWKIFVAY
SEQ ID NO: 35
>tr|A0A087QNJ5|A0A087QNJ5_APTFO C->U-editing enzyme APOBEC-1
(Fragment) OS = Aptenodytes forsteri OX = 9233 GN = AS27_08049
PE = 4 SV = 1
RWKIRPNDFKRNYLPGQHPKVVYLLYEIRWSRGTIWRNWCSNNSTQHAEVNFL
ENCFKAMPSVSCSITWVLSTTPCGKCSRRILEFLRVHPNVTLEIYAAKLFKHLDI
RNRQGLRNLAMNGVIIRIMNLADYSYGWKRFVAY
SEQ ID NO: 36
>tr|A0A2Y9IYV0|A0A2Y9IYV0_ENHLU C->U-editing enzyme APOBEC-1
OS = Enhydra lutris kenyoni OX = 391180 GN = LOC111142361 PE = 4
SV = 1
MASDKGPSAGDATLRRRIEPWEFEVFFDPRELRKEACLLYEIQWGTSHKMWR
NTGKNTANHVELNFIEKFTSERRYCPSTHCSITWFLSWSPCWECCKAIRGFLSQ
HPSVTLVIYVTRLFWHMDPQNRQGLRDLLKSGVTVQIMRAPEYDHCWKNFVNY
PPGKEDHAPRYPELWMKLYELELYCIILSLPPCLKISRRNQNQLTLFRLTLQNC
HYQIIPPHILLDTGLIQLPVIWR
SEQ ID NO: 37
>tr|B2NIW5|B2NIW5_MUSPF Apolipoprotein B mRNA editing protein
OS = Mustela putorius furo OX = 9669 GN = APOBEC1 PE = 2 SV = 1
MASDKGPSAGDATLRRRIEPWEFEVFFDPRELRKEACLLYEIQWGTSHKMWR
NTGKNTANHVELNFIEKFTSERRYCPSTHCSITWFLSWSPCWECSKAIRGFLSQ
CPSVTLVIYVTRLFWHMDPQNRQGLRDLLKSGVTVRIMRAPEYDHCWKNFVNY
PPGKEDHWPRYPELWMKLYELELYCIILSLPPCLKISRRNQKQLTLFRLTLQNCH
YQIIPPHILLDTGLIQLPVIWR
SEQ ID NO: 38
>tr|A0A2Y9E587|A0A2Y9E587_TRIMA C->U-editing enzyme APOBEC-1
OS = Trichechus manatus latirostris OX = 127582 GN = LOC101361717
PE = 4 SV = 1
MTSEEADQRHSTMTSEKGPSTGDGTLRRRITPWEFEIFFDPRELRKETCLLYEI
KWGTSHRIWRNSGQNTTKHAEVNFIEKFTSERNFCPSVSCSITWFLSWSPCWE
CSKAIREFLSQHPNVILVIYVARLFHHMDQQNREGLRDLVLSGVTVQIMSVSEY
GHCWRNFVNYPPGEEARWPRYPPLWMMLYALELHCIILGLPPCLKISRRRQSQ
LTLFSLTPQNCHYQMIPPHILLATGLIQPYVTWR
SEQ ID NO: 39
>tr|G1LKL4|G1LKL4_AILME CMPidCMP-type deaminase domain-containing
protein OS = Ailuropoda melanoleuca OX = 9646 GN = APOBEC1 PE = 4 SV = 1
ISWSTGPSGGDATSRRRIEPWEFEVFFDPRQLRKEACLLYEIQWGTSRKIWRN
SGKNTTNHVEINFIEKFTLERQYCPSIHCSVTWFLSWSPCWECSKAIRAFLSQH
PSVTLVEYVARLFWHMEPQNROGLRDLINSGVTIQIMSVPEYDHCWRNFVNYPP
GKDHWPGYPVLWMKLYALELHCIILSLPPCLKISRRNQNQLTLFRLTLQNCHYQ
TIPPHVLLATGLIQLPVTWR
SEQ ID NO: 40
>tr|A0A093PWR2|A0A093PWR2_9PASS C->U-editing enzyme APOBEC-1
(Fragment) OS = Manacus vitellinus OX = 328815 GN = N305_14278
PE = 4 SV = 1
RWKIQPKDFKRNYLPGQHPQVVYLLYEIRWRNGSIWRNWFSNNRNQHAEVNF
LENCFSDVPPAPCSITWFLSTSPCGKCSRRILEFLRTHRNVTLEIYAAKLFRHQD
IRNRQGLCNLVMNGVTIHIMNLADYSYCWKRFVAY
SEQ ID NO: 41
>sp|Q9EQP0|ABEC1_MESAU C->U-editing enzyme APOBEC-1
OS = Mesocricetus auratus OX = 10036 GN = APOBEC1 PE = 2 SV = 1
MSSETGPVVVDPTLRRRIEPHEFDAFFDQGELRKETCLLYEIRWGGRHNIWRH
TGQNTSRHVEINFIEKFTSERYFYPSTRCSIVWFLSWSPCGECSKAITEFLSGHP
NVTLFIYAARLYHHTDQRNRQGLRDLISRGVTIRIMTEQEYCYCWRNFVNYPPS
NEVYWPRYPNLWMRLYALELYCIHLGLPPCLKIKRRHQYPLTFFRLNLQSCHYQ
RIPPHILWATGFI
SEQ ID NO: 42
>tr|A0A2K6PRF3|A0A2K6PRF3_RHIRO CMP/dCMP-type deaminase domain-
containing protein OS = Rhinopithecus roxellana OX = 61622 GN = APOBEC1
PE = 4 SV = 1
MSWKIWRSSGKNTTNHVEVNFIEKFTSERRFHSSISCSITWFLSWSPCWDCSQ
AIRKFLSQHPGVTLVIYVARLFWHTDQQNROGLRDLVNSGVTIQMMTASEYYH
CWRNFVNYPPGEEAHWPRYPPLWMMLYALELHCIILSLPPCLKISRRWQNHLT
FFRLRLQNCHYQTIPPHILLATGLIQPSVTANR
SEQ ID NO: 43
>tr|A0A0D9RBS4|A0A0D9RBS4_CHLSB Apolipoprotein B mRNA editing
enzyme catalytic subunit 1 OS = Chlorocebus sabaeus OX = 60711 GN = APOBEC1
PE = 4 SV = 1
MSRKIWRSSGKNTTNHVEVNFIEKLTSERRFHSSVSCSVTWFLSWSPCWECS
QAIREFLSQHPGVTLVIYVARLFWHTDQQNRQGLRDLVNSGVTIQIMRASEYYH
CWRNFVNYPPGEEAHWPRYPPLWMMLYALELHCIILSLPPCLKISRRWQNHLT
FFRLHLQNCHYQTIPPHILLATGLIQPPVTWR
SEQ ID NO: 44
>tr|A0A286XNR2|A0A286XNR2_CAVPO CMP/dCMP-type deaminase domain-
containing protein OS = Cavia porcellus OX = 10141 GN = APOBEC1
PE = 4 SV = 1
MASGTGPSTGDATLRRRIEPWQFEAYFDPRQLRKEACMLSEVRWGASPRTW
RESSLNTTSHVEINFIEKFTSGRSLRPAVRCSMTWFLSWSPCWECARAIREFLH
QHPNVSLVIYVARLYWHVDEQNROGLRDLVTSGVRVQIMSDSEYRHCWRNFV
NFPPGQEAGWPRFPPMWTTLYALELSCILLSLPPCLKISRRRQYRLIVFQLILQT
CHYRAIPPQVLSAAELMHPLVAWC
SEQ ID NO: 45
>tr|A0A2Y9HAT6|A0A2Y9HAT6_NEOSC C->U-editing enzyme APOBEC-1
OS = Neomonachus schauinslandi OX = 29088 GN = APOBEC1 PE = 4 SV = 1
MASDKGPSAGDATLRRRIKPWEFEVFFDPRELRKETCLLYEIQWGTSHKIWRN
SGKNTANHVEINFIEKFTSERQYCPSIRCSITWFLSWSPCWECSKAIRGFLSQH
PSVTLVEYVARLFWHIVIDPQNRQGLRDLINSGVTIQIWIRVPEYDHCWRNFVNYLP
GKEDHWPRYPVLWMKLYALELHCIILSLPPCLRISRRQNQLTLFTLTLQNCHYQ
MIPPHILLATGLIQVPVTWK
SEQ ID NO: 46
>tr|A0A091XJL0|A0A091XJL0_OPIHO C->U-editing enzyme APOBEC-1
(Fragment) OS = Opisthocomus hoazin OX = 30419 GN = N306_09750
PE = 4 SV = 1
RWKVQPNDFKRNYLPGQHPKVVYILYEIRWSRGTIWRNWCTNNSTQHAEVNF
LENCFKAMPSVSCSITWVLSTTPCGKCSKRIQDFLRIYPNVTLEIHAAKLFKHLD
TRNREGLRNLAKDGVIIHIMNLADYSYWWKRFVAY
SEQ ID NO: 47
>tr|F6WR88|F6WR88_HORSE Apolipoprotein B mRNA editing enzyme catalytic
subunit 1 OS = Equus caballus OX = 9796 GN = APOBEC1 PE = 4 SV = 2
MSHNIWRYSGKNTTKHVEINFIEKFTSERHLRPSISCSIVWFLSWSPCWECSKAI
REFLS
QHPNVTLVIYVARLFQHMDRLNRQGLRDLINSGVTIQIMRTSEYDHCWRNFVNY
PPGKEAHWPRYPLLWMKLYALELHCIILSLPPCLMISRRCQNQLTFFRLTLQNC
HYQMIPPHILLATGLVQLPVTWR
SEQ ID NO: 48
>sp|P41238|ABEC1_HUMAN C->U-editing enzyme APOBEC-1 OS = Homo
sapiens OX = 9606 GN = APOBEC1 PE = 1 SV = 3
MTSEKGPSTGDPTLRRRIEPWEFDVFYDPRELRKEACLLYEIKWGMSRKIWRS
SGKNTTNHVEVNFIKKFTSERDFHPSMSCSITWFLSWSPCWECSQAIREFLSR
HPGVTLVIYVARLFWHMDQQNRQGLRDLVNSGVTIQIMRASEYYHCWRNFVN
YPPGDEAHWPQYPPLWMMLYALELHCIILSLPPCLKISRRWQNHLTFFRLHLQN
CHYQTIPPHILLATGLIHPSVAWR
SEQ ID NO: 49
>tr|A0A091RU17|A0A091RU17_NESNO C->U-editing enzyme APOBEC-1
(Fragment) OS = Nestor notabilis OX = 176057 GN = N333_10787 PE = 4
SV = 1
RWKIQPNDFKRNYLPYQHPKVVCLLYEIRWNRGTIWRSWCSNNSTQHAEVNFL
ENCFKAKPSVSCSITWVLSTTPCGECSRRILDFLSVYPNVTLKIYAAKLFKHLDN
RNRQGLWNLANNRVIIRIMNLEDYNYYWKRFVAY
SEQ ID NO: 50
>tr|A0A091IWL9|A0A091IWL9_EGRGA C->U-editing enzyme APOBEC-1
(Fragment) OS = Egretta garzetta OX = 188379 GN = Z169_08812 PE = 4
SV = 1
RWKIQPNDFKRNYLPGQHPKVVYLLYEIRWSRGTIWRNWCSNNSTQHAEVNF
LENCFKAMPSVSCSITWVLSTTPCGKCSRRILEFLRVHPSVTLEIYAAKLFKHLDI
RNRQGLRNLAMNGVIIHIMNLADYSYWWKIFVAY
SEQ ID NO: 51
>tr|A0A2K5DG70|A0A2K5DG70_AOTNA CMP/dCMP-type deaminase domain-
containing protein OS = Aotus nancymaae OX = 37293 GN = APOBEC1 PE = 4
SV = 1
MTPEEEVQRQSTMTSERGPSTGDPTLRRRIEPWEFCISYDPKELCKETCLLYEI
KWGTSWKIWRSSGKNTTNHVEVNFIEKFMSERHFHSSISCSITWFLSWSPCWE
CSQAIREFLSRHPGVTLVIYVARLFQHMDRQNRQGLRDLVNSGVTIQIMRASEY
YHCWRNFVNYPPGEEAHWPRYPPLWMMLYALELHCIILGLPPCLKISRRWQNR
LTFFRLHLQNCHYQMIPQHILFATGLIQPPVTWR
SEQ ID NO: 52
>sp|P51908|ABEC1_MOUSE C->U-editing enzyme APOBEC-1 OS = Mus
musculus OX = 10090 GN = Apobec1 PE = 1 SV = 1
MSSETGPVAVDPTLRRRIEPHEFEVFFDPRELRKETCLLYEINWGGRHSVWRH
TSQNTSNHVEVNFLEKFTTERYFRPNTRCSITINFLSWSPCGECSRAITEFLSRH
PYVTLFIYIARLYHHTDQRNRQGLRDLISSGVTIQIMTEQEYCYCWRNFVNYPPS
NEAYWPRYPHLWVKLYVLELYCIILGLPPCLKILRRKQPQLTFFTITLQTCHYQRI
PPHLLWATGLK
SEQ ID NO: 53
>tr|G5BPM8|G5BPM8_HETGA C->U-editing enzyme APOBEC-1 (Fragment)
OS = Heterocephalus glaber OX = 10181 GN = GW7_17308 PE = 4 SV = 1
RRRIEPWQFEASFDPRQLRRETCLLSEVRWGTSPRAWRGCSLNTARHAEVSF
MDRLTSEGRLRGPVRCSITWFLSWSPCGACAQAIGEFLRQHPNVSLVIYIARLF
WHVDEQNRQGLRDLVTRGVRMQVMSDPEFAHCWRNFVNYSPGQEARWPQV
PPVWTWLYSLELHCILLNLPPCLKISRRHHNQLTFFQLILQNCHYQAIPSPVLLAS
GLIHPFVTW
SEQ ID NO: 54
>tr|A0A091QEK6|A0A091QEK6_MERNU C->U-edit ng enzyme APOBEC-1
(Fragment) OS = Merops nubicus OX = 57421 GN = N331_01832 PE = 4
SV = 1
RWKIEPDEFKTNYSPDHRPRVVYLLYEIRWRRGTIWRNWCSNNIDQHAEVNFL
ENCFKAK
PSVSCSITWFLSTAPCAKCSRRILKFLTAHPKVTLEIYAAKLFRHLEIRNRQGLMD
LAVN
GVILRIMNLADYSYCWKQFVAY
SEQ ID NO: 55
>tr|A0A093LP85|A0A093LP85_FULGA C->U-editing enzyme APOBEC-1
(Fragment) OS = Fulmarus glacialis OX = 30455 GN = N327_13724 PE = 4
SV = 1
RWKIQPNDFKRNFLPSKYPKVVYLLYEIRWSSGTIWRSWCSNNSTQHAEVNFL
ENCFKAM
PSVSCSITWVLPITPCGKCSKKILEFLSVHPNVTLEIYAAKLFRHLDIRNQQGLRN
LAMN
GVIIRIMNLADYSYSWKRFVAY
SEQ ID NO: 56
>tr|G1QZV0|G1QZV0_NOMLE CMP/dCMP-type deaminase domain-containing
protein OS = Nomascus leucogenys OX = 61853 GN = APOBEC1 PE = 4 SV = 1
MTSEKGPSTGDPTLRRRIEPWEFDVFYDPRELRKEACLLYEIKWGMSQKIWRS
SGKNTTN
HVEVNFIKKFTSEGRFQSSISCSITWFLSWSPCWECSQAIREFLSQHPGVTLVIY
VARLF
WHMDQQNRQGLRDLVNSGVTIQIMRASEYYHCWRNFVNYPPGDEAHWPRYP
PLWMMLYAL
ELHCIILSLPPCLKISRRWQNHLTFFRLHLQNCHYQTIPPHILLATGLIHPSVTWR
SEQ ID NO: 57
>tr|A0A096MWB4|A0A096MWB4_PAPAN CMP/dCMP-type deaminase domain-
containing protein OS = Papio anubis OX = 9555 GN = APOBEC1 PE = 4 SV = 2
MTSEKGPSTGDPTLRRRIEPWEFDIFYDPRELRKEACLLYEIKWGMSPKIWRSS
GKNTTN
HVEVNFIEKLTSERRFHSSISCSITWFLSWSPCWECSQAIREFLSQHPGVTLVIY
VARLF
WHTDQQNRQGLRDLVNSGVTIQIMTASEYYHCWRNFVNYPPGEEAHWPRYP
PLWMMLYAL
ELHCIILSLPPCLKISRRWQNHLTFFRLHLONCHYQTIPPHILLATGLIQPSVTWR
SEQ ID NO: 58
>sp|Q9TUI7|ABEC1_MONDO C->U-editing enzyme APOBEC-1
OS = Monodelphis domestica OX = 13616 GN = APOBEC1 PE = 1 SV = 1
MNSKTGPSVGDATLRRRIKPWEFVAFFNPQELRKETCLLYEIKWGNQNIWRHS
NQNTSQH
AEINFMEKFTAERHFNSSVRCSITWFLSWSPCWECSKAIRKFLDHYPNVTLAIFI
SRLYW
HMDQQHRQGLKELVHSGVTIQIMSYSEYHYCWRNFVDYPQGEEDYWPKYPYL
WIMLYVLE
LHCIILGLPPCLKISGSHSNQLALFSLDLQDCHYQKIPYNVLVATGLVQPFVTWR
SEQ ID NO: 59
>tr|A0A1S3FTE2|A0A1S3FTE2_DIPOR C->U-editing enzyme APOBEC-1
OS = Dipodomys ordii OX = 10026-GN = Apobec1 PE = 4 SV = 1
MHHSARLPPNCIVSRYANAPWTVLPLPLPPTEAPATGDDTLRRRIEPWEFEAFF
NPQELR
REACLLYQITWSSHKVWRETAKNTVDSHVEVNFIQNLTAGRYCRPSTRCSILWF
LSWSPC
SSCSKAIRLFLSQHPGVSLVIYVARLFQHMDPQNRQGLRELIHSGVTIQVMRPQ
EYDYCWKNFVNYPPGQEEHWPRYPVQCMTLYNLELYCIIHNLPPCVRISKQRQ
SQLAFFSLGLENVHYQRIPPPLLLLTGLVFVFPWK
SEQ ID NO: 60
>tr|A0A2U3WPA5|A0A2U3WPA5_ODORO C->U-editing enzyme APOBEC-1
OS = Odobenus rosmarus divergens OX = 9708 GN = APOBEC1 PE = 4 SV = 1
MASDKGPSAGDATLRRRIEPWEFEVFFDPRELRKEACLLYEIQWGTSHKIWRN
SGKNTSNHVEINFIEKFTSERQYCPSIHCSITWFLSWSPCWECSEAIRGFLSQH
PSVTLVEYVARLFWHIVIDPQNRQGLRDLINSGVTIQIMRVPEYDHCWRNFVNYP
PGKEDHWPRYPVLWMKLYALELHCIILSLPPCLRISRRQNQLTLFRLTLQNCHY
QMIPPHILLATGLIQVPVTWK
SEQ ID NO: 61
>tr|A0A1V4JAP2|A0A1V4JAP2_PATFA C->U-editing enzyme APOBEC-1
OS = Patagioenas fasciata monilis OX = 372326 GN = APOBEC1 PE = 4 SV = 1
MRRKKPSGMYISKRALKDNFDPHKFPHDTYLLCKLQWGDTGRSWIHWIRKDR
YHAEVYFLEKIFKMRRSKNYVNCSITWYLSWSPCVRCCCEILNFLEKHSYVNIDI
YVARLYKIQNSEVREGLKKLVSSKKVTIAVMEIKDYTYCWKNFIQGDADDDSWT
VDFQSAITKNRLKLKDVFEFLKSHPNVTLEIYAAKLFKHLDIRNREGLRNLAKNG
VIIHIMNLADYSYWWKIFVTRQHGEDDYLPWSFALHIFLNCIEFQQILLVSRHLKE
SLRVKSNEKAQEKEVWRIPAMVLAEMIVGKMNRDLMLHEQRANRARNCKGLW
CYIVPL
SEQ ID NO: 62
>tr|A0A2K5JKV4|A0A2K5JKV4_COLAP CMP/dCMP-type deaminase domain-
containing protein OS = Colobus angolensis palliatus OX = 336983 GN = APOBEC1
PE = 4 SV = 1
PSTGDPTLRRRIEPWEFDIFYDPRELRKEACLLYEIKWGMSQKIWRSSGKNTTN
HVEVNFIEKLTSERRFHSSVSCSITWFLSWSPCWECSQAIREFLSQHPGVTLVI
YVARLPAIHTDQQNROGLRDLVNSGVTIQMMTASEYYHCWRNFVNYPPGEEA
HWPRYPPLWMMLYALELHCIILSLPPCLKISRRWQNHLTFFRLHLQNCHYQTIP
PHILLATGLIQPSVTWR
SEQ ID NO: 63
>tr|A0A1U7U8J6|A0A1U7U8J6_TARSY LOW QUALITY PROTEIN: C->U-editing
enzyme APOBEC-1 OS = Tarsius syrichta OX = 1868482 GN = APOBEC1 PE = 4
SV = 2
MLTALMEEVQDTMRFGRRAFFLSNSVGIWVLFDISISXSTGPSMGDPTLRRRIE
PWEFEVLFDPRELRKEACLLYEIKWGTSCKIWRNSGKNTSNHAEVNFLEKFTSE
RHFCSSTSYSITWFLSWSPCWECSRAIREFLSQHPRVTLVIYVARLFWHMEPQ
NRQGLRDLINSGVTIQIMRDSGKSNKQIIRIVCERTW
SEQ ID NO: 64
>tr|F1SLW4|F1SLW4_PIG CMP/dCMP-type deaminase domain-containing
protein OS = Sus scrofa OX = 9823 GN = APOBEC1 PE = 4 SV = 2
MASDRGPSAGDATSRRRIEPWEFEVFFDPRELRKETCLLYELQWGRSRDTWR
HTGKNTTNHVERNFLAKITSERHFHPSVHCSIVWFLSWSPCWECSEAIREFLDQ
HPSVTLVIYVARLFQHMDPQNRQGLRDLVNHGVTIQIMGAPEYDYCWRNFVNY
PPGKEAHWPRFPPVWMTLYALELHCIILGLPPCLKISRRCQNQLTFFRLTLQNC
HYQTIPPHILLATGLIQLPVIYR
SEQ ID NO: 65
>tr|A0A2K6BGI5|A0A2K6BGI5_MACNE CMP/dCMP-type deaminase domain-
containing protein OS = Macaca nemestrina OX = 9545 GN = APOBEC1 PE = 4
SV = 1
MTSEKGPSTGDPTLRRRIEPWEFDIFYDPRELRKEACLLYEIKWGMSPKIWRSS
GKNTTNHVEVNFIEKLTSERRFHSSISCSITWFLSWSPCWECSQAIREFLSQHP
GVTLVIYVARLFWHTDQQNRQGLRDLVNSGVTIQIMRASEYYHCWRNFVNYLP
GEEAHWPRYPPLWMMLYALELHCIILSLPPCLKISRRWQNHLTFFRLHLQNCHY
QMIPPHILLATGLIQPSVTWR
SEQ ID NO: 66
>sp|P47855|ABEC1_RABIT C->U-editing enzyme APOBEC-1 OS = Oryctolagus
cuniculus OX = 9986 GN = APOBEC1 PE = 1 SV = 1
MASEKGPSNKDYTLRRRIEPWEFEVFFDPQELRKEACLLYEIKWGASSKTWRS
SGKNTTNHVEVNFLEKLTSEGRLGPSTCCSITWFLSWSPCWECSMAIREFLSQ
HPGVTLIIFVARLFQHMDRRNRQGLKDLVTSGVTVRVMSVSEYCYCWENFVNY
PPGKAAQWPRYPPRWMLMYALELYCIILGLPPCLKISRRHQKQLTFFSLTPQYC
HYKMIPPYILLATGLLQPSVPWR
SEQ ID NO: 67
>sp|P38483|ABEC1_RAT C->U-editing enzyme APOBEC-1 OS = Rattus
norvegicus OX = 10116 GN = Apobec1 PE = 1 SV = 1
MSSETGPVAVDPTLRRRIEPHEFEVFFDPRELRKETCLLYEINWGGRHSIWRHT
SONTNKHVEVNFIEKFTTERYFCPNTRCSITWFLSWSPCGECSRAITEFLSRYP
HVTLFIYIARLYHHADPRNRQGLRDLISSGVTIQMATEQESGYCWRNFVNYSPSN
EAHWPRYPHLWVRLYVLELYCIILGLPPCLNILRRKQPQLTFFTIALQSCHYQRL
PPHILWATGLK
SEQ ID NO: 68
>tr|A0A091M4D7|A0A091M4D7_CARIC C->U-editing enzyme APOBEC-1
(Fragment) OS = Cariama cristata OX = 54380 GN = N322_12137 PE = 4
SV = 1
RWKIQPDDFKRNYLPGQHPEVVYLLYEIKWNSGTIWRNWCSNNPTQHAEVNFL
ENHFNVMSSVSCSITWGISTTPCGKCSRRILEFLTTHPNVTLEIYAAKLFKHLDIR
NROGLRNLAMNGVVICIMNLADYSYRNKTFVAY
SEQ ID NO: 69
>tr|A0A093F3R4|A0A093F3R4_GAVST C->U-editing enzyme APOBEC-1
(Fragment) OS = Gavia stellata OX = 37040 GN = N328_12441 PE = 4
SV = 1
RWKIQPNDFKRNYLPAQHPKVVYLLYEIRWSRGTIWRNWCSNNSTQHAEVNFL
ENCFKAMPSVSCSITWFLSTTPCGKCSRRILTFLREHPNVTLEIYAAKLFKHLDV
RNQQGLRNLDRNGVIIRIMNFADYSYCWKRFVAY
SEQ ID NO: 70
>tr|G7N5W0|G7N5W0_MACMU C->U-editing enzyme APOBEC-1 (Fragment)
OS = Macaca mulatta OX = 9544 GN = EGK_03318 PE = 4 SV = 1
GPSTGDPTLRRRIEPWEFDIFYDPRELRKEACLLYEIKWGMSPKIWRSSGKNTT
NHVEVNFIEKLTSERRFHSSISCSITWFLSWSPCWECSQAIREFLSQHPGVTLVI
YVARLFWHTDQQNRQGLRDLVNSGVTIQIMRASEYYHCWRNFVNYPPGEEAH
WPRYPPLWMMLYALELHCIELSLPPCLKISRRWQNHLTFFRLHLQNCHYQMIPP
HILLATGLIQPSVTWR
SEQ ID NO: 71
>tr|A0A091MEP8|A0A091MEP8_9PASS C->Uediting enzyme APOBEC-1
(Fragment) OS = Acanthisitta chloris OX = 57068 GN = N310_12928
PE = 4 SV = 1
RWKIQPNDFQRNYLPDQHPQAVYLLYEFRWRRGSIWRKWCSNNRAQHAEVN
FLENCFNGIPPVPCSITWFLSTTPCGNCSRRILEFLRLHPNVTLEIYAAKLFRHTD
IRNRKGLYNLAMNGVIIRIMNLADYSYCWRNFVAY
SEQ ID NO: 72
>tr|A0A2I0LXZ8|A0A2I0LXZ8_COLLI Apolipoprotein B mRNA editing enzyme,
catalytic polypeptide 1 OS = Columba livia OX = 8932 GN = APOBEC1 PE = 4
SV = 1
MAAVTNRDSACRENNQRWKIQPNDFRRNYLPDKQPRVVYLLYEIRWRRGTIW
RNWCSNNPNQHAEVNFLKNYFNAMPSVSCSITWVLSTTPCGKCSIKIMEFLKLH
PNVTLEIYAAKLFKHLDIRNREGLRNLAKNGVIIHIMNLADYSYWWKIFVTRQHG
EEDYLPWSFALHIFLNCIEFQQILLGLPPLLPNFKY
SEQ ID NO: 73
>tr|W5NVH9|W5NVH9_SHEEP CMP/dCMP-type deaminase domain-containing
protein OS = Ovis aries OX = 9940 GN = APOBEC1 PE = 4 SV = 1
MASDRGPPAGDPURRRIEPLEFEFSFDPRNFCKEAYLLYEIQWGNSRDVWRH
SGKNTTKHVERNFIEKIASERHFRPSISCSISWYLSWSPCWECSKAIREFLNQH
PNVTLVIYIARLFQHMDPQNRQGLKDLFHSGVTIQVMRDPEYDYCWRNFVNYP
QGKEAHWPRYPPLWMNLYALELYCIISGLPPCLQISRRHQNQLRVFRLIPQNCH
YQMIPPCILLATGMIQLPVTWRWIE
SEQ ID NO: 74
>tr|H0XVG8|H0XVG8_OTOGA CMP/dCMP-type deaminase domain-containing
protein OS = Otolemur garnettii OX = 30611 GN = APOBEC1 PE = 4 SV = 1
ISWSTGISTGDPTLRRRIEPWEFEVFFDPRELRKETCLLYEIKWGTSHKIWRSTA
RNTTSHAEMNFIEKFTSERCSDAPISCSITWFLSWSPCWECSKNREFVSRHPS
VTLVIYVARLYWHMDQQNRQGLRDLISSGVTVQIMRVSEYCHCWRNFVNYLPG
KEAHCPRCPPLWMTLYALELHCIILSLPPCLKISRGHQNQLTLFRLTLQNCHYQT
IPPHVLLATGLIQPYVTWR
SEQ ID NO: 75
>tr|A0A2B4RXQ3|A0A2B4RXQ3_STYPI C->U-editing enzyme APOBEC-1
OS = Stylophora pistillata OX = 50429 GN = APOBEC1 PE = 4 SV = 1
MASVTELRTPDDFLAELLWTGVTGRTWPNRTFLIVSIKAKDGKPIFGKRFKNRY
PEHAEIIMLRNSNFSDVVEKNHDIDITLTLNYSPCSSCACILKEFYVNNSNIKCFTI
QFSFIYYKEDMKNKTGLQNLEEAGVTLQAMNAESWREVGIDLESFTPEDKEKIN
KRDKDTANDLNEVLSSKQDQDASVDELSSQLNAKLRAKET
SEQ ID NO: 76
>tr|A0A2K5L2J6|A0A2K5L2J6_CERAT CMP/dCMP-type deaminase domain-
containing protein OS = Cercocebus atys OX = 9531 GN = APOBEC1 PE = 4
SV = 1
MTPEEEVQRQSTMTSEKGPSTGDPTLRRRIEPWEFDIFYDPRELRKEACLLYEI
KWGMSPKIWRSSGKNTTNHVEVNFIEKLTSERRFHSSISCSITWFLSWSPCWE
CSQAIREFLSQHPGVTLVIYVARLFWHTDQQNRQGLRDLVNSGVTIQIMRASEY
YHCWRNFVNYPPGEEAHWPRYPPLWMIVILYALELHCIILSLPPCLKISRRQQNH
LTFFRLHLQNCHYQTIPPHILLATGLIQPSVTWR
SEQ ID NO: 77
>tr|A0A2Y9T649|A0A2Y9T649_PHYMC C->U-editing enzyme APOBEC-1
isoform X1 OS = Physeter macrocephalus OX = 9755 GN = APOBEC1 PE = 4
SV = 1
MIICWSTGPSAGDATSRRRIEPWEFEVSFDPREFCKEARLLYEIKWGKSQDVW
RHSGKNTTKHVECNFIEKMTSERHFHPSISCCIIWFLSWSPCWECSKAIREFLN
QHPSVTLVIYIARLFQHTDPQNRQGLRDLIHSGVTLQIMGPPEYDYCWRNFVNY
PPGKEAHWPRYPPLWMKLYALELHCIILGLPPCLKISRRCQNQLTWFRLILQNC
HYQMIPPHILLGTGLIQLPVAWR
SEQ ID NO: 78
>tr|H2NGD0|H2NGD0_PONAB Apolipoprotein B mRNA editing enzyme catalytic
subunit 1 OS = Pongo abelii OX = 9601 GN = APOBEC1 PE = 4 SV = 1
MTPEEEVORQSTMTSEKGPSTGDPTLRRRIESWEFDVFYDPRELRKETCLLYEI
KWGMSRKIWRSSGKNTTNHVEVNFIKKFTSERRFHSSISCSITWFLSWSPCWE
CSQAIREFLSQHPGVTLVIYVARLFWHMDQRNRQGLRDLVNSGVTIQIMRASEY
YHCWRNFVNYPPGDEAHWPQYPPLWMMLYALELHCIILSLPPCLKISRRWQNH
LAFFRLHLQNCHYQTIPPHILLATGLIHPSVTWK
SEQ ID NO: 79
>tr|A0A093JI54|A0A093JI54_EURHL C->U-editing enzyme APOBEC-1
(Fragment) OS = Eurypyga helias OX = 54383 GN = N326_10046 PE = 4 SV = 1
RWKIQPNDFKRNYMPSQYPKVVYLLYEIRWSRGTVWRNWCSNSFTQHAEVNF
LENYFKPMPSVSCSITVVVLSTTPCGKCSRRILEFLRVHPNVTLEIYAAKLFKHLDI
RNRQGLRDLAMNGVTIRIMNLADYSFCWKRFVAY
SEQ ID NO: 80
>tr|G3W4I1|G3W4I1_SARHA Apolipoprotein B mRNA editing enzyme catalytic
subunit 1 OS = Sarcophilus harrisii OX = 9305 GN = APOBEC1 PE = 4 SV = 1
MGDATLRRRIKSWEFEAFFNPQELRKETCLLYEIKWGASHNIWRSSNQNTTQH
AEINFMEKFTSERNFKPSVKCSITWFLSWSPCWRCSKAIREFLNQYPNVTLVIFV
SRLYWHMEQQHRQELKELVCSGVTIQIMNYSEYRHCWRNFVDYLPEEEDHWP
KYPTLWIMLYVLELHCIILGLPPCLKISVRHSDQLVLFSLDLQDCHYQKIPYHVLV
ATGIIRPFVTWR
SEQ ID NO: 81
>tr|A0A2U3Y3M5|A0A2U3Y3M5_LEPWE c->U-editing enzyme APOBEC-1
OS = Leptonychotes weddellii OX = 9713 GN = APOBEC1 PE = 4 SV = 1
MASDKGPSAGDATLRRRIKPWEFEVFFDPRELRKETCLLYEIQWGTSHKIWRN
SGKNTANHVEINFIEKFTSERQYCPSIRCSITWFLSWSPCWECSKAIRGFLSQH
PSVTLVEYVARLFWHIVIDPQNRQGLRDLINSGVTIQIMRVPEYDHCWRNFVNYLP
GKEDHWPRYPVLWMKLYALELHCIILPIEMPGKIRDAPNNMEIFSLFVGRYIPKT
KFHVTCLLSDVRNDDSHLDKTAPKWIRFDSLQPVASDPSAEHWKMKLPGRDD
KTAVVVGTVTEDVACAQGAKLYLCALRVHGHAQRHFLKGRDEILALDQLALDSP
QGLWRQPDLRSHPLKG
SEQ ID NO: 82
>tr|A0A1S3AN78|A0A1S3AN78_ERIEU C->U-editing enzyme APOBEC-1-like
OS = Erinaceus europaeus OX = 9365 GN = LOC103126721 PE = 4 SV = 1
RRIEPWEFEDFFDPRQFRPETCLLYEVRWGSSRNAWRSTARNTTRHAEVNFL
ERFAAERHFDKPVSCSITINFLSWSPCWECSQAIGAFLSQHPQVTLAIHVTRLFH
HEDEQNRQGLRDLLARGVTLQVMGDSEYAHCVVRTFVNSPPGAEGHYPRYPS
DFTRLYALELHCIILGLPPCLEILRRYQNQFTLFRLVPQNCHYQMIPHLNFFVVRH
YFF
SEQ ID NO: 83
>tr|A0A091PSV3|A0A091PSV3_HALAL C->U-editing enzyme APOBEC-1
(Fragment) OS = Haliaeetus albicilla OX = 8969 GN = N329_07103 PE = 4 SV = 1
RWKLQPNDFKRNYLPGQHPKVVYLLYEIRWSRGTIWRNWCSNNSTQHAEVNF
LENCFKATPSVSCSITVVVLSTTPCGKCSRRILEFLRVHPNVTLEIYAAKLFKHLDI
RNRKGLRDLAMNGVIIRIMNLSDYSYCWKTFVAY
SEQ ID NO: 84
>tr|F7F6M6|F7F6M6_CALJA Apolipoprotein B mRNA editing enzyme catalytic
subunit 1 OS = Callithrix jacchus OX = 9483 GN = APOBEC1 PE = 4 SV = 2
RRIEPWEFYISYDPKELCKETCLLYEIKWGMSWKIWRSSGKNTTNHVEINFIEKF
TSERH
FHLSVSCSITWFLSWSPCWECSQAIREFLSQHPGVTLVIYVARLFQHMDQQNR
QGLRDLVNSGVTIQMMTVSEYYHCWRNFVNYPPGEEAHWPRHPPLWLMLYAL
ELHCIILGLPPCLKISRRRQNRLTFFRLHLQNCHYQMIPRHILLATGLIQPSVTWR
SEQ ID NO: 85
>tr|L8IDZ0|L8IDZ0_9CETA C->U-editing enzyme APOBEC-1 OS = Bos mutus
OX = 72004 GN = M91_02456 PE = 4 SV = 1
MIISWSTGPPAGDPTLRRRIEPWEFEFSFDPRKFCKEACLLYEIQWGNNRDVW
RHSGKNTTKHVERNFIEKIASERYFCPSIRCFIFWYLSWSPCVVECSKAIREFLNQ
HPNVTLVIYIARLFQHMDPQNRQGLKDLVQSGVTIQVMRAPEYEYCWRNFVNY
PRGKEAHWPRYPPLWIMNLYALELYCIILGLPPCLHISRRYQNQLIVFRLTLQNCH
YQMIPPYILLATGMVQIPMTVVR
SEQ ID NO: 86
>tr|A0A093CIQ8|A0A093CIQ8_9AVES C->U-editing enzyme APOBEC-1
(Fragment) OS = Pterocles gutturalis OX = 240206 GN = N339 03265 PE = 4
SV = 1
RWKIQPNYFKINNLPGQHPRVVOLLYAIRWSRSTLWKSWCSNNSTQHAEVNFL
ENCFKGNPSVFCFMTWPFFHTTPHGKCCRRTPEFLGVHPNVTLKIRAAKLFKH
LDRYNQQGLRNVAMNGVVIRIINL
SEQ ID NO: 87
>sp|Q9GZX7|AICDA HUMAN Single-stranded DNA cytosine deaminase
OS = Homo sapiens CTX = 9606 GN = AICDA PE = 1 SV = 1
[sequence omitted]
SEQ ID NO: 88
>sp|Q9Y235|ABEC2_HUMAN C->U-editing enzyme APOBEC-2 OS = Homo
sapiens OX = 9606 GN = APOBEC2 PE = 1 SV = 1
MAQKEEAAVATEAASQNGEDLENLDDPEKLKELIELPPFEIVTGERLPANFFKF
QFRNVEYSSGRNKTFLCYVVEAQGKGGQVQASRGYLEDEHAAAHAEEAFFNTI
LPAFDPALRYNVTWYVSSSPCAACADRIIKTLSKTKNLRLLILVGRLFMWEEPEI
QAALKKLKEAGCKLRIMKPQDFEYVWQNFVEQEEGESKAFQPWEDIQENFLYY
EEKLADILK
SEQ ID NO: 89
>sp|P31941|ABC3A_HUMAN DNA dC->dU-editing enzyme APOBEC-3A
OS = Homo sapiens OX = 9606 GN = APOBEC3A PE = 1 SV = 3
MEASPASGPRHLMDPHIFTSNFNNGIGRHKTYLCYEVERLDNGTSVKMDQHR
GFLHNQAKNLLCGFYGRHAELRFLDLVPSLQLDPAQIYRVTWFISWSPCFSWG
CAGEVRAFLQENTHVRLRIFAARIYDYDPLYKEALQMLRDAGAQVSIMTYDEFK
HCWDTFVDHQGCPFQPWDGLDEHSQALSGRLRAILQNQGN
SEQ ID NO: 90
>sp|Q9UH17|ABC3B_HUMAN DNA dC->dU-editing enzyme APOBEC-3B
OS = Homo sapiens OX = 9606 GN = APOBEC3B PE = 1 SV = 1
MNPQIRNPMERMYRDTFYDNFENEPILYGRSYTWLCYEVKIKRGRSNLLWDTG
VFRGQVYFKPQYHAEMCFLSWFCGNQLPAYKCFQITWFVSWTPCPDCVAKLA
EFLSEHPNVTLTISAARLYYYWERDYRRALCRLSQAGARVTIMDYEEFAYCWE
NFVYNEGQQFMPWYKFDENYAFLHRTLKEILRYLMDPDTFTFNFNNDPLVLRR
RQTYLCYEVERLDNGTWVLMDQHMGFLCNEAKNLLCGFYGRHAELRFLDLVP
SLQLDPAQIYRVTWFISWSPCFSWGCAGEVRAFLQENTHVRLRIFAARIYDYDP
LYKEALQMLRDAGAQVSIMTYDEFEYCWDTFVYRQGCPFQPWDGLEEHSQAL
SGRLRAILQNQGN
SEQ ID NO: 91
>sp|Q9NRW3|ABC3C_HUMAN DNA dC->dU-editing enzyme APOBEC-3C
OS = Homo sapiens OX = 9606 GN = APOBEC3C PE = 1 SV = 2
MNPQIRNPMKAMYPGTFYFQFKNLWEANDRNETWLCFTVEGIKRRSVVSWKT
GVFRNQVDSETHCHAERCFLSWFCDDILSPNTKYQVTWYTSWSPCPDCAGEV
AEFLARHSNVNLTIFTARLYYFQYPCYQEGLRSLSQEGVAVEINADYEDFKYCWE
NFVYNDNEPFKPWKGLKTNFRLLKRRLRESLQ
SEQ ID NO: 92
>sp|Q96AK3|ABC3D_HUMAN DNA dC->dU-editing enzyme APOBEC-3D
OS = Homo sapiens OX = 9606 GN = APOBEC3D PE = 1 SV = 1
MNPQIRNPMERMYRDTFYDNFENEPILYGRSYTWLCYEVKIKRGRSNLLWDTG
VFRGPVLPKRQSNHRQEVYFRFENHAENACFLSWFCGNRLPANRRFQITWFVS
WNPCLPCVVKVTKFLAEHPNVTLTISAARLYYYRDRDWRWVLLRLHKAGARVKI
MDYEDFAYCWENFVCNEGQPFMPWYKFDDNYASLHRTLKEILRNPMEANAYPH
IFYFHFKNLLKACGRNESWLCFTIVIEVTKHHSAVFRKRGVFRNQVDPETHCHAE
RCFLSWFCDDILSPNTNYEVTWYTSWSPCPECAGEVAEFLARHSNVNLTIFTA
RLCYFWDTDYQEGLCSLSQEGASVKIMGYKDFVSCWKNFVYSDDEPFKPWKG
LQTNFRLLKRRLREILQ
SEQ ID NO: 93
>sp|Q8IUX4|ABC3F_HUMAN DNA dC->dU-editing enzyme APOBEC-3F
OS = Homo sapiens OX = 9606 GN = APOBEC3F PE = 1 SV = 3
MKPHFRNTVERMYRDTFSYNFYNRPILSRRNTVWLCYEVKTKGPSRPRLDAKI
FRGQVYSQPEHHAEMCFLSWFCGNQLPAYKCFQITWFVSWTPCPDCVAKLAE
FLAEHPNVTLTISAARLYYYWERDYRRALCRLSQAGARVKIMDDEEFAYCWEN
FVYSEGQPFMPWYKFDDNYAFLHRTLKEILRNPMEAMYPHIFYFHFKNLRKAY
GRNESWLCFTMEVVKHHSPVSWKRGVFRNQVDPETHCHAERCFLSWFCDDIL
SPNTNYEVTWYTSWSPCPECAGEVAEFLARHSNVNLTIFTARLYYRAIDTDYQE
GLRSLSQEGASVEIMGYKDFKYCWENFVYNDDEPFKPWKGLKYNFLFLDSKLQ
EILE
SEQ ID NO: 94
>sp|Q9HC16|ABC3G_HUMAN DNA dC->dU-editing enzyme APOBEC-3G
OS = Homo sapiens OX = 9606 GN = APOBEC3G PE = 1 SV = 1
MKPHFRNTVERMYRDTFSYNFYNRPILSRRNTVWLCYEVKTKGPSRPPLDAKI
FRGQVYSELKYHPEVIRFFHWFSKWRKLHRDQEYEVTWYISWSPCTKCTRDIM
ATFLAEDPKVTLTIFVARLYYFWDPDYQEALRSLCQKRDGPRATMKIMNYDEFQ
HCWSKFVYSQRELFEPWNNLPKYYILLHIMLGEILRHSMDPPTFTFNFNNEPWV
RGRHETYLCYEVERMHNDTWVLLNQRRGFLCNQAPHKHGFLEGRHAELCFLD
VIPFWKLDLDQDYRVTCFTSWSPCFSCAQEMAKFISKNKHVSLCIFTARIYDDQ
GRCQEGLRTLAEAGAKISIIMTYSEFKHCWIDTFVDHQGCPFQPWDGLDEHSQD
LSGRLRAILQNQEN
SEQ ID NO: 95
>sp|Q6NTF7|ABC3H_HUMAN DNA dC->dU-editing enzyme APOBEC-3H
OS = Homo sapiens OX = 9606 GN = APOBEC3H PE = 1 SV = 4
MALLTAETFRLQFNNKRRLRRPYYPRKALLCYQLTPQNGSTPTRGYFENKKKC
HAEICFINEIKSMGLDETQCYQVTCYLTINSPCSSCAWELVDFIKAHDHLNLGIFA
SRLYYHWCKPQQKGLRLLCGSQVPVEVMGFPEFADCWENFVDHEKPLSFNPY
KMLEELDKNSRAIKRRLERIKIPGVRAQGRYMDILCDAEV
Petromyzon marinus cytosine deaminase (pmCDA1), Genbank ABO15149.1
SEQ ID NO: 96
MTDAEYVRIHEKLDIYTFKKQFFNNKKSVSHRCYVLFELKRRGERRACFWGYA
VNKPQSGTERGIHAEIFSIRKVEEYLRDNPGQFTINWYSSWSPCADCAEKILEW
YNQELRGNGHTLKIWACKLYYEKNARNQIGLVVNLRDNGVGLNVMVSEHYQCC
RKIFIQSSHNQLNENRWLEKTLKRAEKRRSELSIMIQVKILHTTKSPAV
Petromyzon marinus cytosine deaminase (pmCDA1) R187W, as used in
Target-AID, SEQ ID NO: 97
MTDAEYVRIHEKLDIYTFKKQFFNNKKSVSHRCYVLFELKRRGERRACFWGYA
VNKPQSGTERGIHAEIFSIRKVEEYLRDNPGQFTINWYSSWSPCADCAEKILEW
YNQELRGNGHTLKIWACKLYYEKNARNQIGLWNLRDNGVGLNVMVSEHYQCC
RKIFIQSSHNQLNENRWLEKTLKRAEKWRSELSIMIQVKILHTTKSPAV
E. coli TadA, SEQ ID NO: 98
MSEVEFSHEYWMRHALTLAKRAWDEREVPVGAVLVHNNRVIGEGWNRPIGRH
DPTAHAEIMALRQGGLVMQNYRLIDATLYVTLEPCVMCAGAMIHSRIGRVVFGA
RDAKTGAAGSLMDVLHHPGMNHRVEITEGILADECAALLSDFFRMRRQEIKAQK
KAQSSTD
S. aureus TadA, SEQ ID NO: 99
MTNDIYFMTLAIEEAKKAAQLGEVPIGAIITKDDEVIARAHNLRETLQQPTAHAEHI
AIERAAKVLGSWRLEGCTLYVTLEPCVMCAGTIVMSRIPRVVYGADDPKGGCS
GSLMNLLQQSNFNHRAIVDKGVLKEACSTLLTTFFKNLRANKKSTN
S. pyogenes TadA, SEQ ID NO: 100
MPYSLEEQTYFIMEALKEAEKSLQKAEIPIGCVIVKDGEIIGRGHNAREESNQAI
MHAEMMAINEANAHEGNWRLLDTTLFVTIEPCVMCSGAIGLARIPHVIYGASNQ
KFGGADSLYQILTDERLNHRVQVERGLLAADCANIMQTFFRQGRERKKIAKHLIK
EQSDPFD
S. typhi TadA, SEQ ID NO: 101
MSDVELDHEYWMRHALTLAKRAWDEREVPVGAVLVHNHRVIGEGWNRPIGRH
DPTAHAEIMALRQGGLVLQNYRLLDTTLYVTLEPCVMCAGAMVHSRIGRVVFG
ARDAKTGAAGSLIDVLHHPGMNHRVEIIEGVLRDECATLLSDFFRMRRQEIKALK
KADRAEGAGPAV
A. aeolicus TadA, SEQ ID NO: 102
MGKEYFLKVALREAKRAFEKGEVPVGAIIVKEGEIISKAHNSVEELKDPTAHAEM
LAIKEACRRLNTKYLEGCELYVTLEPCIMCSYALVLSRIEKVIFSALDKKHGGVVS
VFNILDEPTLNHRVKWEYYPLEEASELLSEFFKKLRNNII
S. pombe TAD2, SEQ ID NO: 103
MAGDSVKSAIIGIAGGPFSGKTQLCEQLLERLKSSAPSTFSKLIHLTSFLYPNSVD
RYALSSYDIEAFKKVLSLISQGAEKICLPDGSCIKLPVDQNRIILIEGYYLLLPELLP
YYTSKIFVYEDADTRLERCVLQRVKAEKGDLTKVLNDFVTLSKPAYDSSIHPTRE
NADIILPQKENIDTALLFVSQHLQDILAEMNKTSSSNTVKYDTQHETYMKLAHEIL
NLGPYFVIQPRSPGSCVFVYKGEVIGRGFNETNCSLSGIRHAELIAIEKILEHYPA
SVFKETTLYVTVEPCLMCAAALKQLHIKAVYFGCGNDRFGGCGSVFSINKDQSI
DPSYPVYPGLFYSEAVMLMREFYVQENVKAPVPQSKKQRVLKREVKSLDLSRF
K
S. cerevisiae TAD1, SEQ ID NO: 104
MVSCQGTRPCIVNLLTMPSEDKLGEEISTRVINEYSKLKSACRPIIRPSGIREWTI
LAGVAAINRIDGGANKIEILSIATGVKALPDSELQRSEGKILHDCHAEILALRGANT
VLLNRIQNYNPSSGDKFIQHNDEIPARFNLKENWELALYISRLPCGDASIVISFLND
NCKNDDFIKIEDSDEFQYVDRSVKTILRGRLNFNRRNVVRTKPGRYDSNITLSKS
CSDKLLMKQRSSVLNCLNYELFEKPVFLKYIVIPNLEDETKHHLEQSFHTRLPNL
DNEIKFLNCLKPFYDDKLDEEDVPGLMCSVKLFMDDFSTEEAILNGVRNGFYTK
SSKPLRKHCQSQVSRFAQWELFKKIRPEYEGISYLEFKSRQKKRSQUIAIKNILS
PDGWIPTRTDDVK
S. cerevisiae TAD2, SEQ ID NO: 105
MOHIKHMRTAVRLARYALDHDETPVACIFVHTPTGQVMAYGMNDTNKSLTGVA
HAEFMGIDQIKAMLGSRGVVDVFKDITLYVTVEPCIMCASALKQLDIGKVVFGCG
NERFGGNGTVLSVNHDTCTLVPKNNSAAGYESIPGILRKEAIMLLRYFYVRQNE
RAPKPRSKSDRVLDKNTFPPMEWSKYLNEEAFIETFGDDYRTCFANKVDLSSN
SVDWDLIDSHQDNIIQELEEQCKMFKFNVHKKSKV
A. thaliana TAD2, SEQ ID NO: 106
MEEDHCEDSHNYMGFALHQAKLALEALEVPVGCVFLEDGKVIASGRNRTNETR
NATRHAEMEAIDQLVGQWQKDGLSPSQVAEKFSKCVLYVTCEPCIMCASALSF
LGIKEVYYGCPNDKFGGCGSILSLHLGSEEAQRGKGYKCIRGGIMAEEAVSLFK
CFYEQGNPNAPKPHRPVVQRERT
X. laevis ADAT2, SEQ ID NO: 107
MEPLQITEEIQNWMHKAFQMAQDALNNGEVPVGCLMVYGNQVVGKGRNEVN
ETKNATQHAEMVAIDQVLDWCEMNSKKSTDVFENIVLYVTVEPCIMCAGALRLL
KIPLVVYGCRNERFGGCGSVLNVSGDDIPDTGTKFKCIGGYQAEKAIELLKTFYK
QENPNAPKSKVRKKE
X. tropicalis ADAT2, SEQ ID NO: 108
WITEEIQNWMHKAFQMAQDALNNGEVPVGCLAWYDNQVVGKGRNEVNETKNA
TRHAEMVAIDQVLDWCEKNSKKSRDVFENIVLYVTVEPCIMCAGALRLLKIPLVV
YGCRNERFGGCGSVLNVAGDNIPDTGTEFKYIGGYQAEKAVELLKTFYKQENP
NAPRSKVRKKE
D. rerio ADAT2, SEQ ID NO: 109
MQEVGVDPEKNDFLQPSDSEVQTWMAKAFDMAVEALENGEVPVGCLMVYNN
EIIGKGRNEVNETKNATRHAEMVALDQVLDWCRLREKDCKEVCEQTVLYVTVE
PCIMCAAALRLLRIPFVVYGCKNERFGGCGSVLDVSSDHLPHTGTSFKCIAGYR
AEEAVEMLKTFYKQENPNAPKPKVRKDSINPQDGAAVIQVMRGPPDEETETIAH
LS
B. Taurus ADAT2, SEQ ID NO: 110
MEAKAGPTAATDGAYSVSAEETEKWMEQAMQMAKDALDNTEVPVGCLMVYN
NEVVGKGRNEVNQTKNATRHAEMVAIDQALDWCRRRGRSPSEVFEHTVLYVT
VEPCIMCAAALRLMRIPLVVYGCQNERFGGCGSVLDIASADLPSTGKPFQCTPG
YRAEEAVEMLKTFYKQENPNAPKSKVRKKECHKS
M. musculus ADAT2, SEQ ID NO: 111
MEEKVESTTTPDGPCVVSVQETEKWMEEAMRMAKEALENIEVPVGCLMVYNN
EVVGKGRNEVNQTKNATRHAEMVAIDQVLDWCHQHGQSPSTVFEHTVLYVTV
EPCIMCAAALRLMKIPLVVYGCQNERFGGCGSVLNIASADLPNTGRPFQCIPGY
RAEEAVELLKTFYKQENPNAPKSKVRKKDCQKS
H. sapiens ADAT2 SEQ ID NO: 112
MEAKAAPKPAASGACSVSAEETEKVVMEEAMHMAKEALENTEVPVGCLMVYNN
EVVGKGRNEVNQTKNATRHAEMVAIDQVLDWCRQSGKSPSEVFEHTVLYVTV
EPCIMCAAALRLMKIPLVVYGCQNERFGGCGSVLNIASADLPNTGRPFQCIPGY
RAEEAVEMLKTFYKQENPNAPKSKVRKKECQKS
BE1 for Mammalian expression (rAPOBEC1-XTEN-dCas9.NLS)
SEQ ID NO: 113
MSSETGPVAVDPTLRRRIEPHEFEVFFDPRELRKETCLLYEINWGGRHSIWRHT
SQNTNKHVEVNFIEKFTTERYFCPNTRCSITWFLSWSPCGECSRAITEFLSRYP
HVTLFIYIARLYHHADPRNRQGLRDLISSGVTIQIMTEQESGYCWRNFVNYSPSN
EAHWPRYPHLWVRLYVLELYCIILGLPPCLNILRRKQPQLTFFTIALQSCHYQRL
PPHILWATGLKSGSETPGTSESATPESDKKYSIGLAIGTNSVGWAVITDEYKVPS
KKFKVLGNTDRHSIKKNLIGALLFDSGETAEATRLKRTARRRYTRRKNRICYLQE
IFSNEMAKVDDSFFHRLEESFLVEEDKKHERHPIFGNIVDEVAYHEKYPTIYHLR
KKLVDSTDKADLRLIYLALAHMIKFRGHFLIEGDLNPDNSDVDKLFIQLVQTYNQL
FEENPINASGVDAKAILSARLSKSRRLENLIAQLPGEKKNGLFGNLIALSLGLTPN
FKSNFDLAEDAKLQLSKDTYDDDLDNLLAQIGDQYADLFLAAKNLSDAILLSDILR
VNTEITKAPLSASMIKRYDEHHQDLTLLKALVRQQLPEKYKEIFFDQSKNGYAGY
IDGGASQEEFYKFIKPILEKMDGTEELLVKLNREDLLRKQRTFDNGSIPHQIHLGE
LHAILRRQEDFYPFLKDNREKIEKILTFRIPYYVGPLARGNSRFAWMTRKSEETIT
PWNFEEVVDKGASAQSFIERMTNFDKNLPNEKVLPKHSLLYEYFTVYNELTKVK
YVTEGMRKPAFLSGEQKKAIVDLLFKTNRKVTVKQLKEDYFKKIECFDSVEISGV
EDRFNASLGTYHDLLKIIKDKDFLDNEENEDILEDIVLTLTLFEDREMIEERLKTYA
HLFDDKVMKQLKRRRYTGWGRLSRKLINGIRDKQSGKTILDFLKSDGFANRNF
MQLIHDDSLTFKEDEQKAQVSGQGDSLHEHIANLAGSPAIKKGELQTVKWDELV
KVMGRHKPENIVIEMARENQTTQKGQKNSRERNAKRIEEGIKELGSQLKEHPVE
NTQLQNEKLYLYYLQNGRDMWDQELDENIRLSDYDVDAIVPQSFLKDDSIDNKV
LTRSDKNRGKSDNVPSEEVVKKMKNYWRQLLNAKLITQRKFDNLTKAERGGLS
ELDKAGFEKROLVETRQITKHVAQILDSRMNTKYDENDKLIREVKVITLKSKINSD
FRKDFQFYKVREINNYHHAHDAYLNAVVGTALIKKYPKLESEFVYGDYKVYDVR
KMIAKSEQEIGKATAKYFFYSNIMNFFKTEITLANGEIRKRPLEETNGETGEIVWD
KGRDFATVRKVLSMPQVNIVKKTEVQTGGFSKESILPKRNSDKLIARKKDWDPK
KYGGFDSPTVAYSVLVVAKVEKGKSKKLKSVKELLGETIMERSSFEKNPIDFLEA
KGYKEVKKDLIIKLPKYSLFELENGRKRMLASAGELQKGNELALPSKYVNFLYLA
SHYEKLKGSPEDNEQKQLFVEQHKHYLDEHEQISEFSKRVILADANLDKVLSAY
NKHRDKPIREQAENIIHLFTLTNLGAPAAFKYFDTTIDRKRYTSTKEVLDATLIHQ
SITGLYETRIDLSQLGGDSGGSPKKKRKV
BE2 (rAPOBEC1-XTEN-dCas9-UGI-NLS) SEQ ID NO: 114
MSSETGPVAVDPURRRIEPHEFEVFFDPRELRKETCLLYEINWGGRHSIWRHT
SQNTNKHVEVNFIEKFTTERYFCPNTRCSITWFLSWSPCGECSRAITEFLSRYP
HVTLFIYIARLYHHADPRNRQGLRDLISSGVTIQIMTEQESGYCWRNFVNYSPSN
EAHWPRYPHLWVRLYVLELYCIILGLPPCLNILRRKQPQLTFFTIALQSCHYQRL
PPHILWATGLKSGSETPGTSESATPESDKKYSIGLAIGTNSVGWAVITDEYKVPS
KKFKVLGNTDRHSIKKNLIGALLFDSGETAEATRLKRTARRRYTRRKNRICYLQE
IFSNEMAKVDDSFFHRLEESFLVEEDKKHERHPIFGNIVDEVAYHEKYPTIYHLR
KKLVDSTDKADLRLIYLALAHMIKFRGHFLIEGDLNPONSDVDKLFIQLVQTYNQL
FEENPINASGVDAKAILSARLSKSRRLENLIAQLPGEKKNGLFGNLIALSLGLTPN
FKSNFDLAEDAKLQLSKDTYDDDLDNILLAQIGDQYADLFLAAKNLSDAILLSDILR
VNTEITKAPLSASMIKRYDEHHQDLTLLKALVRQQLPEKYKEIFFDQSKNGYAGY
IDGGASQEEFYKFIKPILEKMDGTEELLVKLNREDLLRKQRTFDNGSIPHQIHLGE
LHAILRRQEDFYPFLKDNREKIEKILTFRIPYYVGPLARGNSRFAWMTRKSEETIT
PWNFEEVVDKGASAQSFIERMTNFDKNLPNEKVLPKHSLLYEYFTVYNELTKVK
YVTEGVIRKPAFLSGEOKKANDLLFKTNRKVTVKQLKEDYFKKIECFDSVEISGV
EDRFNASLGTYHDLLKIIKDKDFLDNEENEDILEDIVLTLTLFEDREMIEERLKTYA
HLFDDKVMKQLKRRRYTGWGRLSRKLINGIRDKQSGKTILDFLKSDGFANRNF
MQLIHDDSLTFKEDIQKAQVSGQGDSLHEHIANLAGSPAIKKGILQTVKVVDELV
KVMGRHKPENIVIEMARENQTTQKGQKNSRERIMKRIEEGIKELGSQILKEHPVE
NTQLQNEKLYLYYLQNGRDMWDQELDINRLSDYDVDAIVPQSFLKDDSIDNKV
LTRSDKNRGKSDNVPSEEVVKKMKNYWRQLLNAKLITQRKFDNLTKAERGGLS
ELDKAGFIKRQLVETRQITKHVAQILDSRVINTKYDENDKLIREVKVITLKSKLVSD
FRKDFQFYKVREINNYHHAHDAYLNAVVGTALIKKYPKLESEFVYGDYKVYDVR
KMIAKSEQEIGKATAKYFFYSNIMNFFKTEITLANGEIRKRPLIETNGETGEIVWD
KGRDFATVRKVLSMPQVNIVKKTEVQTGGFSKESILPKRNSDKLIARKKDWDPK
KYGGFDSPTVAYSVLVVAKVEKGKSKKLKSVKELLGITIMERSSFEKNPIDFLEA
KGYKEVKKDLIIKLPKYSLFELENGRKRMLASAGELQKGNELALPSKYVNFLYLA
SHYEKLKGSPEDNECKQLFVEQHKHYLDEIIEQISEFSKRVILADANLDKVLSAY
NKHRDKPIREQAENIIHLFTLTNLGAPAAFKYFDTTIDRKRYTSTKEVLDATLIHQ
SITGLYETRIDLSQLGGDSGGSTNLSDIIEKETGKQLVIQESILMLPEEVEEVIGNK
PESDILVHTAYDESTDENVIMLLTSDAPEYKPWALVEQDSNGENKIKMLSGGSPK
KKRKV
BE3 (rAPOBEC1-XTEN-Cas9n-UGI-NLS) SEQ ID NO: 115
MSSETGPVAVDPTLRRRIEPHEFEVFFDPRELRKETCLLYEINWGGRHSIWRHT
SQNTNKHVEVNFIEKFTTERYFCPNTRCSITWFLSWSPCGECSRAITEFLSRYP
HVTLFIYIARLYHHADPRNRQGLRDLISSGVTIQINATEQESGYCWRNFVNYSPSN
EAHWPRYPHLWVRLYVLELYCHLGLPPOLNELRRKQPQLTFFTIALQSCHYQRL
PPHILWATGLKSGSETPGTSESATPESDKKYSIGLAIGTNSVGWAVITDEYKVPS
KKFKVLGNTDRHSIKKNLIGALLFDSGETAEATRLKRTARRRYTRRKNRICYLQE
IFSNEMAKVDDSFFHRLEESFLVEEDKKHERHPIFGNIVDEVAYHEKYPTIYHLR
KKLVDSTDKADLRLIYLALAHMIKFRGHFLIEGDLNPDNSDVDKLFICIVQTYNCI
FEENPINASGVDAKAILSARLSKSRRLENLIAQLPGEKKNGLFGNLIALSLGLTPN
FKSNFDLAEDAKLQLSKIDTYDDDLDNLLAQIGDQYADLFLAAKNLSDAILLSDILR
VNTEITKAPLSASMIKRYDEHHQDLTLLKALVRQQLPEKYKEIFFDQSKNGYAGY
IDGGASQEEFYKFIKPILEKMDGTEELLVKLNREDLLRKQRTFDNGSIPHQHLGE
LHAILRRQEDFYPFLKDNREKIEKILTFRIPYYVGPLARGNSRFAWMTRKSEETIT
PWNFEEVVDKGASAQSFIERMTNFDKNLPNEKVLPKHSLLYEYFTVYNELTKVK
YVTEGIVIRKPAFLSGEQKKANDLIFKTNRKVTVKQLKEDYFKKIECFDSVEISGV
EDRFNASLGTYHDLLKIIKDKDFLDNEENEDILEDIVLTLTLFEDREMIEERLKTYA
HLFDDKVMKQLKRRRYTGWGRLSRKLINGIRDKQSGKTILDFLKSDGFANRNF
MQLIHDDSLTFKEDIQKAQVSGQGDSLHEHIANLAGSPAIKKGILQTVKVVDELV
KVMGRHKPENIVIEMARENQTTQKGQKNSRERMKRIEEGIKELGSQILKEHPVE
NTQLONEKLYLYYLQNGRDMYVDQELDINRLSOYDVDHIVPQSFLKDDSIDNKV
LTRSDKNRGKSDNVPSEEVVKKMKNYWRQLLNAKLITQRKFDNLTKAERGGLS
ELDKAGFIKRQLVETRQITKHVAQILDSRMNTKYDENDKLIREVKVITLKSKLVSD
FRKDFQFYKVREINNYHHAHDAYLNAVVGTALIKKYPKLESEFVYGDYKVYDVR
KMIAKSEQEIGKATAKYFFYSNIMNFFKTEITLANGEIRKRPLIETNGETGEIVWD
KGRDFATVRKVLSMPOVNIVKKTEVQTGGFSKESILPKRNSDKLIARKKDWDPK
KYGGFDSPTVAYSVLVVAKVEKGKSKKLKSVKELLGITIMERSSFEKNPIDFLEA
KGYKEVKKDLIIKLPKYSLFELENGRKRMLASAGELQKGNELALPSKYVNFLYLA
SHYEKLKGSPEDNEQKQLFVEQHKHYLDEHEQISEFSKRVILADANLDKVLSAY
NKHRDKPIREQAENIIHLFTLTNLGAPAAFKYFDTTIDRKRYTSTKEVLDATLIHQ
SITGLYETRIDLSQLGGDSGGSTNLSDIIEKETGKQLVIQESILIMLPEEVEEVIGNK
PESDILVHTAYDESTDENVMLITSDAPEYKPWALVIQDSNGENKIKMLSGGSPK
KKRKV
CDA1-BE3: SEQ ID NO: 116
MTDAEYVRIHEKLDIYTFKKOFFNNKKSVSHRCYVLFELKRRGERRACFWGYA
VNKPQSGTERGIHAEIFSIRKVEEYLRDNPGQFTINWYSSWSPCADCAEKILEW
YNQELRGNGHTLKIWACKLYYEKNARNQIGLWNLRDNGVGLNVMVSEHYQCC
RKIFIQSSHNQLNENRWLEKTLKRAEKRRSELSIMIQVKILHTTKSPAVSGSETP
GTSESATPESDKKYSIGLAIGTNSVGWAVITDEYKVPSKKFKVLGNTDRHSIKKN
LIGALLEDSGETAEATRLKRTARRRYTRRKNRICYWEIFSNEMAKVDDSFFHRL
EESFLVEEDKKHERHPIFGNIVDEVAYHEKYPTIYHLRKKLVDSTDKADLRLIYLA
LAHMEKFRGHFLIEGDLNPQNSDVDKLFIQLVQTYNQLFEENPINASGVDAKAILS
ARLSKSRRLENLIAQLPGEKKNGLFGNLIALSLGLTPNFKSNFDLAEDAKLQLSK
DTYDDDLDNLLAQIGDQYADLFLAAKNLSDAILLSDILRVNTEITKAPLSASMIKRY
DEHHQDLTLLKALVRQQLPEKYKEIFFDQSKNGYAGYIDGGASQEEFYKFIKPIL
EKMDGTEELLVKLNREDLLRKQRTFDNGSIPHQIHLGELHAILRRQEDFYPFLKD
NREKIEKILTFRIPYYVGPLARGNSRFAWMTRKSEETITPWNFEEVVDKGASAQ
SFIERMTNFDKNLPNEKVLPKHSLLYEYFTVYNELTKVKYVTEGMRKPAFLSGE
QKKANDLLFKTNRKVTVKQLKEDYFKKIECFDSVEISGVEDRFNASLGTYHDLL
KIIKDKDFLDNEENEDILEDIVLTLTLFEDREMIEERLKTYAHLFDDKVMKQLKRR
RYTGWGRLSRKLINGIRDKQSGKTILDFLKSDGFANRNFMQLIHDDSLTFKEDIQ
KAQVSGQGDSLHEHIANLAGSPAIKKGILQTVKWDELVKVMGRHKPENIVIEMA
RENQTTQKGQKNSRERMKRIEEGIKELGSQILKEHPVENTQLQNEKLYLYYLQN
GRDMYVDQELDINRLSDYDVDHIVPQSFLKDDSIDNKVLTRSDKNRGKSDNVPS
EEVVKKMKNYWRQLLNAKLITQRKFDNLTKAERGGLSELDKAGFIKRQLVETRQ
ITKHVAQILDSRMNTKYDENDKLIREVKVITLKSKLVSDFRKDFQFYKVREINNYH
HAHDAYLNAVVGTALIKKYPKLESEFVYGDYKVYDVRKMIAKSEQEIGKATAKYF
FYSNIMNFFKTEITLANGEIRKRPL
IETNGETGEIVWDKGRDFATVRKVLSMPQVNIVKKTEVQTGGFSKESILPKRNS
DKLIARKKDWDPKKYGGFIDSPTVAYSVLWAKVEKGKSKKLKSWELLGITIMER
SSFEKNPIDFLEAKGYKEVKKDLIIKLPKYSLFELENGRKRMLASAGELQKGNEL
ALPSKYVNFLYLASHYEKLKGSPEDNEQKQLFVEQHKHYLDEIIEQISEFSKRVIL
ADANLDKVLSAYNKHRDKPIREQAENIIHLFTLTNLGAPAAFKYFDTTIDRKRYTS
TKEVLDATLIHQSITGLYETRIDLSQLGGDSGGSTNLSDIIEKETGKOLVIQESILM
LPEEVEEVIGNKPESDILVHTAYDESTDENVMLLTSDAPEYKPWALVIQDSNGE
NKIKMLSGGSPKKKRKV
AID-BE3: SEQ ID NO: 117
MDSLLMNRRKFLYQFKNVRWAKGRRETYLCYVVKRRDSATSFSLDFGYLRNK
NGCHVELLFLRYISDWDLDPGRCYRVTWFTSWSPCYDCARHVADFLRGNPNL
SLRIFTARLYFCEDRKAEPEGLRRLHRAGVQIAIMTFKDYFYCWNTFVENHERT
FKAWEGLHENSVRLSRQLRRILLPLYEVDDLRDAFRTLGLSGSETPGTSESATP
ESDKKYSIGLAIGTNSVGWAVITDEYKVPSKKFKVLGNTDRHSIKKNLIGALLFDS
GETAEATRLKRTARRRYTRRKNRICYLQEIFSNEMAKVDDSFFHRLEESFLVEE
DKKHERHPIFGNIVDEVAYHEKYPTIYHLRKKLVDSTDKADLRLIYLALAHMIKFR
GHFLIEGDLNPDNSDVDKLFIQLVQTYNQLFEENPINASGVIDAKAI
LSARLSKSRRLENLIAQLPGEKKNGLFGNLIALSLGLTPNFKSNFDLAEDAKLQL
SKDTYDDDLDNLLAQIGDQYADLFLAAKNLSDAILLSDILRVNTEITKAPLSASMIK
RYDEHHQDLTLLKALVRQQLPEKYKEIFFDQSKNGYAGYIDGGASQEEFYKFIK
PILEKMDGTEELLVKLNREDLLRKORTFDNGSIPHQIHLGELHAILRRQEDFYPFL
KDNREKIEKILTFRIPYYVGPLARGNSRFAWMTRKSEETITPWNFEEVVDKGAS
AQSFIERMTNFDKNLPNEKVLPKHSLLYEYFTVYNELTKVKYVTEGMRKPAFLS
GEQKKAIVDLLFKTNRKVTVKQLKEDYFKKIECFDSVEISGVEDRFNASLGTYHD
LLKIIKDKDFLDNEENEDILEDIVLTLTLFEDREMIEERLKTYAHLFDDKVMKQLKR
RRYTGWGRLSRKLINGIRDKQSGKTILDFLKSDGFANRNFMQLIHDDSLTFKEDI
QKAQVSGQGDSLHEHIANLAGSPAIKKGILQTVKVVDELVKVMGRHKPENIVIEM
ARENQTTQKGQKNSRERMKRIEEGIKELGSQILKEHPVENTQLQNEKLYLYYLQ
NGRDMYVDQELIDINRLSDYDVDHIVPQSFLKDDSIDNKVLTRSDKNRGKSDNV
PSEDNKKNAKNYWRQLLNAKLETQRKFDNLTKAERGGLSELDKAGFIKRQLVET
RQITKHVAQILDSRMNTKYDENDKLIREVKVITLKSKLVSDFRKDFQFYKVREINN
YHHAHDAYLNAVVGTALIKKYPKLESEFVYGDYKVYDVRKMIAKSEQEIGKATA
KYFFYSNIMNFFKTEETLANGEERKRPLEETNGETGEIVWDKGRDFATVRKVLSNA
PQVNIVKKTENVQTGGFSKESILPKRNSDKLEARKKDWDPKKYGGFDSPTVAYSV
LWAKVEKGKSKKLKSVIKELLGITIMERSSFEKNPIDFLEAKGYKEVKKDLIEKLPK
YSLFELENGRKRMLASAGELQKGNELALPSKYVNFLYLASHYEKLKGSPEDNE
QKQLFVEQHKHYLDEIIEQISEFSKRVILADANLDKVLSAYNKHRDKPEREQAENIE
HLFTLTNLGAPAAFKYFDTTEDRKRYTSTKEVLDATLIHQSITGLYETREDLSQLG
GDSGGSTNLSDIIEKETGKQLVIQESILMLPEEVEEVIGNKPESDILVHTAYDEST
DENVMLLTSDAPEYKPWALVIQDSNGENKIKNALSGGSPKKKRIKV
BE3-Gam: SEQ ID NO: 118
MAKPAKRIKSAAAAYVPQNRDAVITDIKRIGDWREASRLETEMNDAIAEITEKFA
ARIAPIKTDIETLSKGVQGWCEANRDELTNGGKVKTANLVTGDVSWRVRPPSV
SIRGMDAVMETLERLGLQRFIRTKQEINKEAILLEPKAVAGVAGITVKSGIEDFSII
PFEQEAGISGSETPGTSESATPESSSETGPVAVDPTLRRRIEPHEFEVFFDPRE
LRKETCLLYEINWGGRHSIWRHTSQNTNKHVEVNFIEKFTTERYFCPNTRCSIT
WFLSWSPCGECSRAITEFLSRYPHVTLFIYIARLYHHADPRNRQGLRDLISSGVT
IQIMTEQESGYCWRNFVNYSPSNEAHWPRYPHLWVRLYVLELYCIILGLPPOLNI
LRRKQPQLTFFTIALQSCHYQRLPPHILWATGLKSGSETPGTSESATPESDKKY
SIGLAIGTNSVGWAVITDEYKVPSKKFKVLGNTDRHSIKKNLIGALLFDSGETAEA
TRLKRTARRRYTRRKNRICYLQEIFSNEMAKVDDSFFHRLEESFLVEEDKKHER
HPIFGNIVDEVAYHEKYPTIYHLRKKLVDSTDKADLRLIYLALAHMIKFRGHFLIEG
DLNPDNSDVDKLFIQLVQTYNQLFEENPINASGVDAKAILSARLSKSRRLENLIA
QLPGEKKNGLFGNLIALSLGLTPNFKSNFDLAEDAKLQLSKDTYDDDLDNLLAQI
GDQYADLFLAAKNLSDAILLSDILRVNTEITKAPLSASMIKRYDEHHQDLTLLKAL
VRQQLPEKYKEIFFDQSKNGYAGYIDGGASQEEFYKFIKPILEKMDGTEELLVKL
NREDLLRKQRTFDNGSPHQIHLGELHAERRQEDFYPFLKDNREKIEKILTFRIP
YYVGPLARGNSRFAWMTRKSEETITPWNFEEVVDKGASAQSFIERMTNFDKNL
PNEKVLPKHSLLYEYFTVYNELTKVKYVTEGMRKPAFLSGEQKKANDLIFKTNR
KVTVKQLKEDYFKKIECFDSVEISGVEDRFNASLGTYHDLLKIIKDKDFLDNEENE
DILEDIVLTLTLFEDREMIEERLKTYAHLFDDKVMKQLKRRRYTGWGRLSRKLIN
GIRDKQSGKTILDFLKSDGFANRNFMOLIHDDSLTFKEDIQKAQVSGQGDSLHE
HIANLAGSPAIKKGILQTVKVVDELVKVMGRHKPENIVIEMARENQTTQKGQKNS
RERMKRIEEGIKELGSQLKEHPVENTQLQNEKLYLYYLQNGRDIMYVDQELDIN
RLSDYDVDHIVPQSFLKDDSIDNKLTRSDKNRGKSDNVPSEEVVKKIMKNYWR
QLLNAKLITQRKFDNLTIKAERGGLSELDKAGFIKRQLVETRQITKHVAQILDSRM
NTKYDENDKLIREVKVITLKSKLVSDFRKDFQFYKVREINNYHHAHDAYLNAVVG
TALIKKYPKLESEFVYGDYKVYDVRKMIAKSEQEIGKATAKYFFYSNIMNFFKTEI
TLANGEIRKRPLIETNGETGEIVWDKGRDFATVRKVLSMPQVNIVKKTEVQTGG
FSKESILPKRNSDKLIARKKDWDPKKYGGFDSPTVAYSVIANAKVEKGKSKKLK
SVKELLGITIMERSSFEKNPIDFLEAKGYKEVKKDLIIKLPKYSLFELENGRKRMLA
SAGELQKGNELALPSKYVNFLYLASHYEKLKGSPEDNEQKQLFVEQHKHYLDEI
IEQISEFSKRVILADANLDKVLSAYNKHRDKPIREQAENIIHLFTLTNLGAPAAFKY
FDTTIDRKRYTSTKEVLDATLIHQSITGLYETRIDLSQLGGDSGGSTNLSDIEKET
GKQLVIQESILMLPEEVEEVIGNKPESDILVHTAYDESTDENVMLLTSDAPEYKP
WALVIQDSNGENKIKMLSGGSPKKKRKV
SaBE3-Gam: SEQ ID NO: 119
MAKPAKRIKSAAAAYVPQNRDAVITDIKRIGDLQREASRLETEMNDAIAEITEKFA
ARIAPIKTDIETLSKGVQGWCEANRDELTNGGKVKTANLVTGDVSWRVRPPSV
SIRGMDAVMETLERLGLQRFIRTKQEINKEAILLEPKAVAGVAGITVKSGIEDFSII
PFEQEAGISGSETPGTSESATPESSSETGPVAVDPTLRRRIEPHEFEVFFDPRE
LRKETCLLYEINWGGRHSIWRHTSQNTNKHVEVNFIEKFTTERYFCPNTRCSIT
WFLSWSPCGECSRAITEFLSRYPHVTLFIYIARLYHHADPRNRQGLRDLISSGVT
IQIMTEQESGYCWRNFVNYSPSNEAHWPRYPHLWVRLYVLELYCIILGLPPCLNI
LRRKQPQLTFFTIALQSCHYQRLPPHILWATGLKSGSETPGTSESATPESGKRN
YILGLAIGITSVGYGIIDYETRDVIDAGVRLFKEANVENNEGRRSKRGARRLKRR
RRHRIQRVKKLLFDYNLLTDHSELSGINPYEARVKGLSQKLSEEEFSAALLHLAK
RRGVHNVNEVEEDTGNELSTKEQISRNSKALEEKYVAELQLERLKKDGEVRGSI
NRFKTSDYVKEAKQLLKVQKAYHQLDQSFIDTYIDLLETRRTYYEGPGEGSPFG
WKDIKEWYEMLMGHCTYFPEELRSVKYAYNADLYNALNDLNNLVITRDENEKL
EYYEKFQIIENVFKQKKKPTLKQIAKEILVNEEDIKGYRVTSTGKPEFTNLKVYHDI
KDITARKEIIENAELLDQIAKILTIYQSSEDIQEELTNLNSELTQEEIEQISNLKGYTG
THNLSLKAINLILDELWHTNDNQIAIFNRLKLVPKKVDLSQQKEIPTTLVDDFILSP
VVKRSFIQSIKVINAIIKKYGLPNDIIIELAREKNSKDAQKMINEMQKRNRQTNERI
EEIIRTTGKENAKYLIEKIKLHDMQEGKCLYSLEAIPLEDLLNNPFNYEVDHIIPRS
VSFDNSFNNKVLVKQEENSKKGNRTPFQYLSSSDSKISYETFKKHILNLAKGKG
RISKTKKEYLLEERDINRFSVQKDFINRNLVDTRYATRGLMNLLRSYFRVNNLDV
KVKSINGGFTSFLRRKWKFKKERNKGYKHHAEDALIIANADFIFKEWKKLDKAKK
VMENQMFEEKQAESMPEIETEQEYKEIFITPHQIKHIKDFKDYKYSHRVDKKPNR
ELINDTLYSTRKDDKGNTLIVNNLNGLYDKDNDKLKKLINKSPEKLLMYHHDPQT
YQKLKLIMEQYGDEKNPLYKYYEETGNYLTKYSKKDNGPVIKKIKYYGNKLNAHL
DITDDYPNSRNKVVKLSLKPYRFDVYLDNGVYKFVTVKNLDVIKKENYYEVNSK
CYEEAKKLKKISNQAEFIASFYNNDLIKINGELYRVIGVNNDLLNRIEVNMIDITYR
EYLENMNDKRPPRIIKTIASKTQSIKKYSTDILGNLYEVKSKKHPQIIKKGGSPKKK
RKVSSDYKDHDGDYKDHDIDYKDDDDKSGGSTNLSDIIEKETGKQLVIQESILML
PEEVEEVIGNKPESDILVHTAYDESTDENVMLLT
SDAPEYKPWALVIQDSNGENKIKMLSGGSPKKKRKV
BE4: SEQ ID NO: 120
MSSETGPVAVDPTLRRRIEPHEFEVFFDPRELRKETCLLYEINWGGRHSIWRHT
SQNTNKHVEVNFIEKFTTERYFCPNTRCSITWFLSWSPCGECSRAITEFLSRYP
HVTLFIYIARLYHHADPRNRQGLRDLISSGVTIQIMTEQESGYCWRNFVNYSPSN
EAHWPRYPHLWVRLYVLELYCIILGLPPCLNILRRKQPQLTFFTIALQSCHYQRL
PPHILWATGLKSGGSSGGSSGSETPGTSESATPESSGGSSGGSDKKYSIGLAI
GTNSVGWAVITDEYKVPSKKFKVLGNTDRHSIKKNLIGALLFDSGETAEATRLKR
TARRRYTRRKNRICYLQEIFSNEMAKVDDSFFHRLEESFLVEEDKKHERHPIFG
NIVDEVAYHEKYPTIYHLRKKLVDSTDKADLRLIYLALAHMIKFRGHFLIEGDLNP
DNSDVDKLFIQLVQTYNQLFEENPINASGVDAKAILSARLSKSRRLENLIAQLPG
EKKNGLFGNLIALSLGLTPNFKSNFDLAEDAKLQLSKDTYDDDLDNLLAQIGDQY
ADLFLAAKNLSDAILLSDILRVNTEITKAPLSASMIKRYDEHHQDLTLLKALVRQQ
LPEKYKEIFFDQSKNGYAGYIDGGASQEEFYKFIKPILEKMDGTEELLVKLNRED
LLRKQRTFDNGSIPHQIHLGELHAILRRQEDFYPFLKDNREKIEKILTFRIPYYVGP
L
ARGNSRFAWMTRKSEETITPWNFEEVVDKGASAQSFIERMTNFDKNLPNEKVL
PKHSLLYEYFTVYNELTKVKYVTEGMRKPAFLSGEQKKANDLLFKTNRKVTVK
QLKEDYFKKIECFDSVEISGVEDRFNASLGTYHDLLKIIKDKDFLDNEENEDILEDI
VLTLTLFEDREMIEERLKTYAHLFDDKVMKQLKRRRYTGWGRLSRKLINGIRDK
QSGKTILDFLKSDGFANRNFMQLIHDDSLTFKEDIQKAQVSGQGDSLHEHIANLA
GSPAIKKGILQTVKVVDELVKVMGRHKPENIVIEMARENQTTQKGQKNSRERMK
RIEEGIKELGSQILKEHPVENTQLQNEKLYLYYLQNGRDMYVDQELDINRLSDYD
VDHIVPQSFLKDDSIDNKVLTRSDKNRGKSDNVPSEEVVKKMKNYWRQLLNAK
LITQRKFDNLTKAERGGLSELDKAGFIKRQLVETRQITKHVAQILDSRMNTKYDE
NDKLIREVKVITLKSKLVSDFRKDFQFYKVREINNYHHAHDAYLNAVVGTALIKKY
PKLESEFVYGDYKVYDVRKMIAKSEQEIGKATAKYFFYSNIMNFFKTEITLANGEI
RKRPLIETNGETGEIVWDKGRDFATVRKVLSMPQVNIVKKTEVUGGFSKESIL
PKRNSDKLIARKKDWDPKKYGGFDSPTVAYSVLVVAKVEKGKSKKLKSWELL
GITIMERSSFEKNPIDFLEAKGYKEVKKDLIIKLPKYSLFELENGRKRMLASAGEL
QKGNELALPSKYVNFLYLASHYEKLKGSPEDNEQKQLFVEQHKHYLDEIIEQISE
FSKRVILADANLDKVLSAYNKHRDKPIREQAENIIHLFTLTNLGAPAAFKYFDTTID
RKRYTSTKEVLDATLIHQSITGLYETRIDLSQLGGDSGGSGGSGGSTNLSDIIEK
ETGKQLVIQESILMLPEEVEEVIGNKPESDILVHTAYDESTDENVMLLTSDAPEY
KPWALVIQDSNGENKIKMLSGGSGGSGGSTNLSDIIEKETGKQLVIQESILMLPE
EVEEVIGNKPESDILVHTAYDESTDENVMLLTSDAPEYKPWALVIQDSNGENKIK
MLSGGSPKKKRK
BE4-Gam: SEQ ID NO: 121
MAKPAKRIKSAAAAYVPQNRDAVITDIKRIGDWREASRLETEMNDAIAEITEKFA
ARIAPIKTDIETLSKGVQGWCEANRDELTNGGKVKTANLVTGDVSWRVRPPSV
SIRGMDAVMETLERLGLQRFIRTKQEINKEAILLEPKAVAGVAGITVKSGIEDFSII
PFEQEAGISGSETPGTSESATPESSSETGPVAVDPTLRRRIEPHEFEVFFDPRE
LRKETCLLYEINWGGRHSIWRHTSQNTNKHVEVNFIEKFTTERYFCPNTRCSIT
WFLSWSPCGECSRAITEFLSRYPHVTLFIYIARLYHHADPRNRQGLRDLISSGVT
IQIMTEQESGYCWRNFVNYSPSNEAHWPRYPHLWVRLYVLELYCIILGLPPCLNI
LRRKQPQLTFFTIALQSCHYQRLPPHILWATGLKSGGSSGGSSGSETPGTSESA
TPESSGGSSGGSDKKYSIGLAIGTNSVGWAVITDEYKVPSKKFKVLGNTDRHSI
KKNLIGALLFDSGETAEATRLKRTARRRYTRRKNRICYLQEIFSNEMAKVDDSFF
HRLEESFLVEEDKKHERHPIFGNIVDEVAYHEKYPTIYHLRKKLVDSTDKADLRLI
YLALAHMIKFRGHFLIEGDLNPDNSDVDKLFIQLVQTYNQLFEENPINASGVDAK
AILSARLSKSRRLENLIAQLPGEKKNGLFGNLIALSLGLTPNFKSNFDLAEDAKLQ
LSKDTYDDDLDNLLAQIGDQYADLFLAAKNLSDAILLSDILRVNTEITKAPLSASMI
KRYDEHHQDLTLLKALVRQQLPEKYKEIFFDQSKNGYAGYIDGGASQEEFYKFI
KPILEKMDGTEELLVKLNREDLLRKQRTFDNGSIPHQHLGELHAILRRQEDFYP
FLKDNREKIEKILTFRIPYYVGPLARGNSRFAWMTRKSEETITPWNFEEVVDKGA
SAQSFIERMTNFDKNLPNEKVLPKHSLLYEYFTVYNELTKVKYVTEGMRKPAFL
SGEQKKANDLLFKTNRKVTVKQLKEDYFKKIECFDSVEISGVEDRFNASLGTYH
DLLKIIKDKDFLDNEENEDILEDIVLTLTLFEDREMIEERLKTYAHLFDDKVNAKQLK
RRRYTGWGRLSRKLINGIRDKQSGKTELDFLKSDGFANRNFMQLIH
DDSLTFKEDIQKACWSGQGDSLHEHIANLAGSPAIKKGILQTVKVVDELVKVIMG
RHKPENIVIEMARENQTTQKGQKNSRERMKRIEEGIKELGSQILKEHPVENTQL
QNEKLYLYYLQNGRDMYVDQELDINRLSDYDVDHIVPQSFLKDDSIDNKVLTRS
DKNRGKSDNVPSEEVVKKMKNYWRQLLNAKLITQRKFDNLTKAERGGLSELDK
AGFIKRQLVETRQITKHVAQILDSRMNTKYDENDKLIREVKVITLKSKLVSDFRKD
FQFYKVREINNYHHAHDAYLNAVVGTALIKKYPKLESEFWGDYKVYDVRKMIA
KSEQEIGKATAKYFFYSNIMNFFKTEITLANGEIRKRPLIETNGETGEIVWDKGRD
FATVRKVLSNAPQVNIVKKTEVQTGGFSKESILPKRNSDKLIARKKDWDPKKYGG
FDSPTVAYSVLANAKVEKGKSKKLKSVKELLGITIMERSSFEKNPIDFLEAKGYK
EVKKDLIIKLPKYSLFELENGRKRNALASAGELQKGNELALPSKYVNFLYLASHYE
KLKGSPEDNEQKQLFVEQHKHYLDEIIEQISEFSKRVILADANLDKVLSAYNKHR
DKPIREQAENIIHLFTLTNLGAPAAFKYFDTTIDRKRYTSTKEVLDATLIHQSITGL
YETRIDLSQLGGDSGGSGGSGGSTNLSDHEKETGKQLVIQESILMLPEEVEEVI
GNKPESDILVHTAYDESTDENVMLLTSDAPEYKPWALVIQDSNGENKIKVILSGG
SGGSGGSTNLSDHEKETGKQLVIQESILMLPEEVEEVIGNKPESDILVHTAYDES
TDENVMLLTSDAPEYKPWALVIQDSNGENKIKMLSGGSPKKKRK
SaBE4: SEQ ID NO: 122
MSSETGPVAVDPURRRIEPHEFEVFFDPRELRKETCLLYEINWGGRHSIWRHT
SQNTNKHVEVNFIEKFTTERYFCPNTRCSITWFLSWSPCGECSRAITEFLSRYP
HVTLFIYIARLYHHADPRNRQGLRDLISSGVTIQIMTEQESGYCWRNFVNYSPSN
EAHWPRYPHLWVRLYVLELYCHLGLPPOLNILRRKOPQLTFFTIALQSCHYQRL
PPHILWATGLKSGGSSGGSSGSETPGTSESATPESSGGSSGGSGKRNYILGLA
IGITSVGYGIIDYETRDVIDAGVRLFKEANVENNEGRRSKRGARRLKRRRRHRIQ
RVKKLLFDYNLLTDHSELSGINPYEARVKGLSQKLSEEEFSAALLHLAKRRGVH
NVNEVEEDTGNELSTKEQISRNSKALEEKYVAELQLERLKKDGEVRGSINRFKT
SDYVKEAKQLLKVQKAYHQLDQSFIDTYIDLLETRRTYYEGPGEGSPFGWKDIK
EWYEMLMGHCTYFPEELRSVKYAYNADLYNALNDLNNLVITRDENEKLEYYEK
FQIIENVFKQKKKPTLKQIAKEILVNEEDIKGYRVTSTGKPEFTNLKVYHDIKDITA
RKEHENAELLDQIAKILTIYQSSEDIQEELTNLNSELTQEEIEQISNLKGYTGTHNL
SLKAINLILDELWHTNDNQIAIFNRLKLVPKKVDLSQQKEIPTTLVDDFILSPWKR
SFIQSIKVINAIIKKYGLPNDIIIELAREKNSKDAQKMINEMQKRNRQTNERIEEHRT
TGKENAKYLIEKIKLHDMEGKOLYSLEAIPLEDLLNNPFNYEVDHIIPRSVSFDN
SFNNKVLVKQEENSKKGNRTPFQYLSSSDSKISYETFKKHILNLAKGKGRISKTK
KEYLLEERDINRFSVQKDFINRNLVDTRYATRGLMNLLRSYFRVNNLDVKVKSIN
GGFTSFLRRKWKFKKERNKGYKHHAEDALIIANADFIFKEWKKLDKAKKVMENQ
MFEEKOAESMPEIETEQEYKEIFITPHQIKHIKDFKDYKYSHRVDKKPNRELINDT
LYSTRKDDKGNTLIVNNLNGLYDKDNDKLKKLINKSPEKLLMYHHDPQTYQKLK
LIMEQYGDEKNPLYKYYEETGNYLTKYSKKDNGPVIKKIKYYGNKLNAHLDITDD
YPNSRNKVVKLSLKPYRFDVYLDNGVYKFVTVKNLDVIKKENYYEVNSKCYEEA
KKLKKISNQAEFIASFYNNDLIKINGELYRVIGVNNDLLNRIEVNMIDITYREYLEN
VINDKRPPRIIKTIASKTQSIKKYSTDILGNLYEVKSKKHPQIIKKGGSPKKKRKVS
SDYKDHDGDYKDHDIDYKDDDDKSGGSGGSGGSTNLSDIIEKETGKQLVIQESI
LIMLPEEVEEVIGNKPESDILVHTAYDESTDENVNALLTSDAPEYKPWALVIQDSN
GEN
KIMILSGGSGGSGGSTNLSDIEEKETGKQLVIQESILMLPEEVEEVIGNKPESDIL
VHTAYDESTDENVMLLTSDAPEYKPWALVIQDSNGENKIKMLSGGSPKKKRKV
SaBE4-Gam: SEQ ID NO: 123
MAKPAKRIKSAAAAYVPQNRDAVITDIKRIGDLQREASRLETEMNDAIAEITEKFA
ARIAPIKTDIETLSKGVQGWCEANRDELTNGGKVKTANLVTGDVSWRVRPPSV
SIRGMDAVMETLERLGLQRFIRTKQEINKEAILLEPKAVAGVAGITVKSGIEDFSII
PFEQEAGISGSETPGTSESATPESSSETGPVAVDPTLRRRIEPHEFEVFFDPRE
LRKETCLLYEINWGGRHSIWRHTSQNTNKHVEVNFIEKFTTERYFCPNTRCSIT
WFLSWSPCGECSRAITEFLSRYPHVTLFIYIARLYHHADPRNRQGLRDLISSGVT
IQIMTEQESGYCWRNFVNYSPSNEAHWPRYPHLWVRLYVLELYCIILGLPPCLNI
LRRKQPQLTFFTIALQSCHYQRLPPHILWATGLKSGGSSGGSSGSETPGTSESA
TPESSGGSSGGSGKRNYILGLAIGITSVGYGIIDYETRDVIDAGVRLFKEANVEN
NEGRRSKRGARRLKRRRRHRIQRVKKLLFDYNLLTDHSELSGINPYEARVKGLS
QKLSEEEFSAALLHLAKRRGVHNVNEVEEDTGNELSTKEQISRNSKALEEKYVA
ELQLERLKKDGEVRGSINRFKTSDYVKEAKQLLKVQKAYHQLDQSFIDTYIDLLE
TRRTYYEGPGEGSPFGWKDIKEWYEMLMGHCTYFPEELRSVKYAYNADLYNA
LNDLNNLVITRDENEKLEYYEKFQIIENVFKQKKKPTLKQIAKEILVNEEDIKGYRV
TSTGKPEFTNLKVYHDIKDITARKEIIENAELLDQIAKILTIYQSSEDIQEELTNLNS
ELTQEEIEQISNLKGYTGTHNLSLKAINLILDELWHTNDNQIAIFNRLKLVPKKVDL
SQQKEIPTTLVDDFILSPVVKRSFIQSIKVINAIIKKYGLPNDIIIELAREKNSKDAQK
MINEMQKRNRQTNERIEEIIRTTGKENAKYLIEKIKLHDMQEGKCLYSLEAIPLED
LLNNPFNYEVDHIIPRSVSFDNSFNNKVLVKQEENSKKGNRTPFQYLSSSDSKIS
YETFKKHILNLAKGKGRISKTKKEYLLEERDINRFSVQKDFINRNLVDTRYATRGL
MNLLRSYFRVNNLDVKVKSINGGFTSFLRRKWKFKKERNKGYKHHAEDALIIAN
ADFIFKEWKKLDKAKKVMENQMFEEKQAESMPEIETEQEYKEIFITPHQIKHIKD
FKDYKYSHRVDKKPNRELINDTLYSTRKDDKGNTLIVNNLNGLYDKDNDKLKKLI
NKSPEKLLMYHHDPQTYQKLKLIMEQYGDEKNPLYKYYEETGNYLTKYSKKDN
GPVIKKIKYYGNKLNAHLDITDDYPNSRNKVVKLSLKPYRFDVYLDNGVYKFVTV
KNLDVIKKENYYEVNSKCYEEAKKLKKISNQAEFIASFYNNDLIKINGELYRVIGV
NNDLLNRIEVNMIDITYREYLENMNDKRPPRIIKTIASKTOSIKKYSTDILGNLYEV
KSKKHPQIIKKGGSPKKKRKVSSDYKDHDGDYKDHDIDYKDDDDKSGGSGGSG
GSTNLSDIIEKETGKQLVIQESILMLPEEVEEVIGNKPESDILVHTAYDESTDENV
MLLTSDAPEYKPWALVIQDSNGENKIKMLSGGSGGSGGSTNLSDIIEKETGKQL
VIQESILMLPEEVEEVIGNKPESDILVHTAYDESTDENVMLLTSDAPEYKPWALVI
QDSNGENKIKMLSGGSPKKKRKV
BE4max and AncSE4max, SEQ ID NO: 124
MKRTADGSEFESPKKKRKVSGGSSGGSSGSETPGTSESATPESSGGSSGGS
DKKYSIGLAIGTNSVGWAVITDEYKVPSKKFKVLGNTDRHSIKKNLIGALLFDSG
ETAEATRLKRTARRRYTRRKNRICYLQEIFSNEMAKVDDSFFHRLEESFLVEED
KKHERHPIFGNIVDEVAYHEKYPTIYHLRKKLVDSTDKADLRLIYLALAHMIKFRG
HFLIEGDLNPDNSDVDKLFIQLVQTYNQLFEENPINASGVDAKAILSARLSKSRR
LENLIAQLPGEKKNGLFGNLIALSLGLTPNFKSNFDLAEDAKLQLSKDTYDDDLD
NLLAQIGDQYADLFLAAKNLSDAILLSDILRVNTEITKAPLSASMIKRYDEHHQDL
TLLKALVRQQLPEKYKEIFFDQSKNGYAGYIDGGASQEEFYKFIKPILEKMDGTE
ELLVKLNREDLLRKQRTFDNGSIPHQIHLGELHAILRRQEDFYPFLKDNREKIEKI
LTFREPYYVGPLARGNSRFAWMTRKSEETITPWNFEEVVDKGASAQSFIERMTN
FDKNLPNEKVLPKHSLLYEYFTVYNELTKVKYVTEGMRKPAFLSGEQKKANDLL
FKTNRKVTVKQLKEDYFKKIECFDSVEISGVEDRFNASLGTYHDLLKIIKDKDFLD
NEENEDELEDIVLTLTLFEDREMIEERLKTYAHLFDDKVMKQLKRRRYTGWGRL
SRKLINGIRDKQSGKTILDFLKSDGFANRNFMLIHDDSLTFKEDIQKAQVSGQG
DSLHEHIANLAGSPAIKKGILQTVKWDELVKVMGRHKPENIVIEMARENQTTQK
GQKNSRERMKREEEGIKELGSQILKEHPVENTQLQNEKLYLYYLQNGRDMWD
QELDINRLSDYDVDHIVPQSFLKDDSIDNKVLTRSDKNRGKSDNVPSEENNKKM
KNYWRQLLNAKLITQRKFDNLTKAERGGLSELDKAGFIKRQLVETRQITKHVAQI
LDSRMNTKYDENDKLIREVKVITLKSKLVSDFRKDFQFYKVREINNYHHAHDAYL
NAVVGTALIKKYPKLESEFVYGDYKVYDVRKMIAKSEQEIGKATAKYFFYSNIMN
FFKTEITLANGEIRKRPLIETNGETGEIVWDKGRDFATVRKVLSMPQVNIVKKTE
VQTGGFSKESILPKRNSDKLIARKKDWDPKKYGGFDSPTVAYSVLVVAKVEKG
KSKKLKSVKELLGITIMERSSFEKNPIDFLEAKGYKEVKKDLIIKLPKYSLFELENG
RKRMLASAGELQKGNELALPSKYVNFLYLASHYEKLKGSPEDNEQKQLFVEQH
KHYLDEHEQISEFSKRVILADANLDKVLSAYNKHRDKPIREQAENIIHLFTLTNLG
APAAFKYFDTTIDRKRYTSTKEVLDATLIHQSITGLYETRIDLSQLGGDSGGSGG
SGGSTNLSDIIEKETGKQLVIQESILMLPEEVEEVIGNKPESDILVHTAYDESTDE
NVNALLTSDAPEYKPWALVIQDSNGENKIKMLSGGSGGSGGSTNLSDHEKETGK
QLVIQESILMLPEEVEEVIGNKPESDILVHTAYDESTDENVMLLTSDAPEYKPWA
LVIQDSNGENKIKMLSGGSKRTADGSEFEPKKKRKV
Rat APOBEC1, SEQ ID NO: 125
SSETGPVAVDPTLRRRIEPHEFEVFFDPRELRKETCLLYEINWGGRHSIWRHTS
QNTNKHVEVNFIEKFTTERYFCPNTRCSITWFLSWSPCGECSRAITEFLSRYPH
VTLFIYIARLYHHADPRNRQGLRDLISSGVTIQIMTEQESGYDNRNFVNYSPSNE
AHWPRYPHLWVRLYVLELYCHLGLPPOLNILRRKQPQLTFFTIALQSCHYQRLP
PHILWATGLK
Anc689 APOBEC, SEQ ID NO: 126
SSETGPVAVDPTLRRRIEPHEFEVFFDPRELRKETCLLYEIKWGTSHKIWRHSS
KNTTKHVEVNFIEKFTSERHFCPSTSCSITWFLSWSPCGECSKAITEFLSQHPN
VTLVIYVARLYHHVIDQQNRQGLRDLVNSGVTIQIMTAPEYDYCWRNFVNYPPG
KEAHWPRYPPLWMKLYALELHAGILGLPPCLNILRRKOPQLTFFTIALQSCHYQ
RLPPHILWATGLK
Anc687 APOBEC, SEQ ID NO: 127
SSETGPVAVDPTLRRRIEPHEFEVFFDPRELRKEACLLYEIKWGTSHKIWRNSG
KNTTKHVEVNFIEKFTSERHFCPSISCSITWFLSWSPCWECSKAIREFLSQHPN
VTLVIYVARLFQHMDCMRQGLRDLVNSGVTIQIMTASEYDHCWRNFVNYPPG
KEAHWPRYPPLWMKLYALELHAGILGLPPCLNILRRKQPQLTFFTIALQSCHYQ
RLPPHILWATGLK
Anc686 APOBEC, SEQ ID NO: 128
SSETGPVAVDPTLRRRIEPEFFNRNYDPRELRKETYLLYEIKWGKESKIWRHTS
NNRTQHAEVNFLENFFNELYFNPSTHCSITWFLSWSPCGECSKAIVEFLKEHPN
VNLEIYVARLYLCEDERNRQGLRDLVNSGVTIRIMNLPDYNYCWRTFVSHQGG
DEDYWPRHFAPWVRLYVLELYCIILGLPPCLNILRRKQPQLTFFTIALQSCHYQR
LPPHILWATGLK
Anc655 APOBEC, SEQ ID NO: 129
SSETGPVAVDPTLRRRIEPFYFQFNNDPRACRRKTYLCYELKQDGSTINVWKRT
LHNKGRHAEICFLEKISSLEKLDPAQHYRITWYMSWSPCSNCAQKIVDFLKEHP
HVNLRIYVARLYYHEEERYQEGLRNLRRSGVSIRVMDLPDFEHCWETFVDNGG
GPFQPWPGLEELNSKQLSRRLQAGILGLPPCLNILRRKQPQLTFFTIALQSCHY
QRLPPHILWATGLK
Anc733 APOBEC, SEQ ID NO: 130
SSETGPVAVDPTLRRRIEPFHFQFNNDPRAYRRKTYLOYELKQDGSTWVLDRT
LRNKGRHAEICFLDKINSWERLDPAQHYRVTWYMSWSPCSNCAQQVVDFLKE
HPHVNLRIFAARLYYHEQRRYQEGLRSLRGSGVPVAVMTLPDFEHOWETFVDH
GGRPFQPWDGLEELNSRSLSRRLQAGILGLPPCLNILRRKQPQLTFFTIALQSC
HYQRLPPHILWATGLK
APOBEC ancestor #686, SEQ ID NO: 131
EFFNRNYDPRELRKETYLLYEIKWGKESKIWRHWCTSNNRTQHAEVNFLENFF
NELYFNPSTHCSITWFLSWSPCGECSKAIVEFLKEHPNVNLEIYVARLYLCEDER
NRQGLRDLVNSGVTIRIMNLPDYNYCWRTFVSHQGGDEDYWPRHFAPWVRL
APOBEC ancestor #733, SEQ ID NO: 132
FHFQFNNDPRAYRRKTYLCYELKQDGSTWVLDRGCTLRNKGRHAEICFLDKIN
SWERLDPAQHYRVTWYMSWSPCSNCAQQVVDFLKEHPHVNLRIFAARLYYHE
QRRYQEGLRSLRGSGVPVAVMTLPDFEHOWETFVDHGGRPFQPWDGLEELN
SRSLSRRLQAG
APOBEC ancestor #656, FERNY, SEQ ID NO: 133
FERNYDPRELRKETYLLYEIKWGKSGKLWRHWCQNNRTQHAEVYFLENIFNAR
RFNPSTHCSITWYLSWSPCAECSQKIVDFLKEHPNVNLEIYVARLYYHEDERNR
QGLRDLVNSGVTIRIMDLPDYNYCWKTFVSDQGGDEDYWPGHFAPWIKQYSL
KL
APOBEC ancestor #655, SEQ ID NO: 134
FYFQFNNDPRACRRKTYLCYELKQDGSTWVWKRGCTLHNKGRHAEICFLEKIS
SLEKLDPAQHYRITWYMSWSPCSNCAQKIVDFLKEHPHVNLRIWARLYYHEEE
RYQEGLRNLRRSGVSIRVIMDLPDFEHCWETFVDNGGGPFQPWPGLEENSKQL
SRRLQAG
APOBEC ancestor #649, SEQ ID NO: 135
FYEEFNNTLKSCRHKTLLCFSLKQDENTTLWKWGYAHNNGRHAEILVLREIENY
EKLDPAAKYRITLYMSYSPCNDCADKIVDFLKKHPNVNLNIKVSRLYYHEDEKYQ
EGLRNLKQPGVSLKVMDRSDFEECFDLFVDPGGGEFQPWPGLEEKSKQYSAT
WAG
ABE6.3, SED ID: 136
MSEVEFSHEYWNARHALTLAKRAWDEREVPVGAVLVHNNRVIGEGWNRPIGRH
DPTAHAEIMALRQGGLVIMNYRLIDATYVTLEPCVNACAGAMIHSRIGRVVFGAR
DAKTGAAGSLNADVLHHPGMNHRVEITEGILADECAALLSDFFRNARRQEIKAOKK
AQSSTDSGGSSGGSSGSETPGTSESATPESSGGSSGGSSEVEFSHEYWMRH
ALTLAKRAWDEREVPVGAVINLNNRVIGEGWNRSEGLHDPTAHAEIMALRQGG
LVMQNYRLIDATLYVTFEPCVMCAGAMIHSRIGRVVFGVRNAKTGAAGSLNADVL
HYPGMNHRVEITEGILADECAALLCYFFRVIRRQVFNAQKKAQSSTDSGGSSGG
SSGSETPGTSESATPESSGGSSGGSDKKYSIGLAIGTNSVGWAVITDEYKVPSK
KFKVLGNTDRHSIKKNLIGALLFDSGETAEATRLKRTARRRYTRRKNRICYLQEIF
SNEMAKVDDSFFHRLEESFLVEEDKKHERHPIFGNIVDEVAYHEKYPTIYHLRKK
LVDSTDKADLRLIYLALAHMIKFRGHFLIEGDLNPDNSDVDKLFIQLVQTYNQLFE
ENPINASGVDAKAILSARLSKSRRLENLIAQLPGEKKNGLFGNLIALSLGLTPNFK
SNFDLAEDAKLQLSKDTYDDDLDNLLAQIGDQYADLFLAAKNLSDAILLSDILRVN
TEITKAPLSASMIKRYDEHHQDLTLLKALVRQQLPEKYKEIFFDQSKNGYAGYID
GGASQEEFYKFIKPILEKVIDGTEELLVKLNREDLLRKQRTFDNGSPHQIHLGEL
HAILRRQEDFYPFLKDNREKIEKILTFRIPYYVGPLARGNSRFAWMTRKSEETITP
WNFEEVVDKGASAQSFIERMTNFDKNLPNEKVLPKHSLLYEYFTVYNELTKVKY
VTEGMRKPAFLSGEQKKANDLIFKTNRKVTVKQLKEDYFKKIECFDSVEISGVE
DRFNASLGTYHDLLKIIKDKDFLDNEENEDILEDIVLTLTLFEDREMIEERLKTYAH
LFDDKVMKQLKRRRYTGWGRLSRKLINGIRDKOSGKTILDFLKSDGFANRNFM
QLIHDDSLTFKEDIQKAQVSGQGDSLHEHANLAGSPAIKKGILQTVKVVDELVK
VMGRHKPENIVIEMARENQTTQKGOKNSRERMKRIEEGIKELGSCAKEHPVEN
TQLQNEKLYLYYLQNGRDMYVDQELDINRLSDYDVDHIVPQSFLKDDSIDNKVL
TRSDKNRGKSDNVPSEEVVKKMKNYWRQLLNAKLITQRKFDNLTKAERGGLSE
LDKAGFIKRQLVETRQITKHVAQILDSRMNTKYDENDKLIREVKVITLKSKINSOF
RKDFQFYKVREINNYHHAHDAYLNAVVGTALIKKYPKLESEFVYGDYKVYDVRK
MIAKSEQEIGKATAKYFFYSNIVINFFKTEITLANGEIRKRPLIETNGETGERANDK
GRDFATVRKVLSMPQVNIVKKTEVQTGGFSKESILPKRNSDKLIARKKDWDPKK
YGGFDSPTVAYSVLVVAKVEKGKSKKLKSVKELLGITIMERSSFEKNPIDFLEAK
GYKEVKKDLIIKLPKYSLFELENGRKRMLASAGELQKGNELALPSKYVNFLYLAS
HYEKLKGSPEDNECKQLFVEQHKHYLDEIIEQISEFSKRVILADANLDKVLSAYN
KHRDKPIREQAENIIHLFTLTNLGAPAAFKYFDTTIDRKRYTSTKEVLDATLIHQSI
TGLYETRIDLSQLGGDSGGSPKKKRKV
ABE7.8, SED ID: 137
MSEVEFSHEYWMRHALTLAKRAWDEREVPVGAVLVHNNRVIGEGWNRPIGRH
DPTAHAEIMALRQGGLVMONYRLIDATLYVTLEPCVMCAGAMIHSRIGRVVFGA
RDAKTGAAGSLMDVLHHPGMNHRVEITEGILADECAALLSDFFRMRRQEIKAQK
KAQSSTDSGGSSGGSSGSETPGTSESATPESSGGSSGGSSEVEFSHEYWNIR
HALTLAKRALDEREVPVGAVLVLANRVIGEGWNRAIGLHDPTAHAEIMALRQGG
LVMQNYRLIDATLYVTFEPCVMCAGAMIHSRIGRVVFGVRNAKTGAAGSLMDVL
HYPGMNHRVEITEGILADECNALLCYFFRMRRQVFNAQKKAQSSTDSGGSSGG
SSGSETPGTSESATPESSGGSSGGSDKKYSIGLAIGTNSVGWAVITDEYKVPSK
KFKVLGNTDRHSIKKNLIGALLFDSGETAEATRLKRTARRRYTRRKNRICYLQEIF
SNEMAKVDDSFFHRLEESFLVEEDKKHERHPIFGNIVDEVAYHEKYPTIYHLRKK
LVDSTDKADLRLIYLALAHMIKFRGHFLIEGDLNPDNSDVDKLFIQLVQTYNQLFE
ENPINASGVDAKAILSARLSKSRRLENLIAQLPGEKKNGLFGNLIALSLGLTPNFK
SNFDLAEDAKLQLSKDTYDDDLDNLLAQIGDQYADLFLAAKNLSDAILLSDILRVN
TEITKAPLSASMIKRYDEHHQDLTLLKALVRQQLPEKYKEIFFDQSKNGYAGYED
GGASQEEFYITIKPILEKMDGTEELLVKLNREDLLRKQRTFDNGSPHQEHLGEL
HAELRRQEDFYPFLKDNREKIEKELTFRIPYYVGPLARGNSRFAWMTRKSEETITP
WNFEEVVDKGASAQSFIERMTNFDKNLPNEKVLPKHSLLYEYFTVYNELTKVKY
VTEGNARKPAFLSGEQKKANDLIFKTNRIKVTVKQLKEDYFKKIECFDSVEISGVE
DRFNASLGTYHDLLKIIKDKDFLDNEENEDILEDIVLTLTLFEDREMIEERLKTYAH
LFDDKVMKQLKRRRYTGWGRLSRKLINGIRDIKQSGKTILDFLKSDGFANRNFM
QLIHDDSLTFKEDIQKAQVSGQGDSLHEHIANLAGSPAIKKGILQTVKVVDELVK
VMGRHKPENIVIEMARENQTTQKGQKNSRERMKRIEEGIKELGSQILKEHPVEN
TQLQNEKLYLYYLQNGRDMYVDQELDINIRLSDYDVDHIVPQSFLIKDDSIDNKVL
TRSDKNRGIKSDNVPSEEVVKKMKNYWRQLLNAKLITQRKFDNLTKAERGGLSE
LDKAGFIKRQLVETRQITKHVAQILDSRMNTIKYDENDKLIREVIKVITLKSKLVSDF
RKDFQFYKVREINNYHHAHDAYLNAVVGTALIKKYPKLESEFVYGDYKVYDVRK
MIAKSEQEIGKATAKYFFYSNIMNFFKTEITLANGEIRKRPLIETNGETGEIVWDK
GRDFATVRKVLSMPQVNIVKIKTEVQTGGFSKESILPKRNSDKLIARKKDWDPKK
YGGFDSPTVAYSVLWAKVEKGKSKKLKSVIKELLGITIMERSSFEKNPIDFLEAK
GYKEVKKDLIIKLPKYSLFELENGRKRMLASAGELQKGNELALPSKYVNFLYLAS
HYEKLKGSPEDNEQKQLFVEQHKHYLDEHEQISEFSKRVILADANLDKVLSAYN
KHRDKPIREQAENIIHLFTLTNLGAPAAFKYFDTTIDRKRYTSTKEVLDATLIHQSI
TGLYETRIDLSQLGGDSGGSPKKKRKV
ABE7.9, SED ID: 138
MSEVEFSHEYWMRHALTLAKRAWDEREVPVGAVLVHNNRVIGEGWNRPIGRH
DPTAHAEIMALRQGGLVMQNYRLIDATLYVTLEPCVMCAGAMIHSRIGRVVFGA
RDAKTGAAGSLMDVLHHPGMNHRVEITEGILADECAALLSDFFRMRRQEIKAQK
KAQSSTDSGGSSGGSSGSETPGTSESATPESSGGSSGGSSEVEFSHEYWMR
HALTLAKRALDEREVPVGAVLVLANRVIGEGWNRAIGLHDPTAHAEIMALRQGG
LVMQNYRLIDATLYVTFEPCVMCAGAMIHSRIGRVVFGVRNAKTGAAGSLMDVL
HYPGMNHRVEITEGILADECNALLCYFFRMPRQVFNAQKKAQSSTDSGGSSGG
SSGSETPGTSESATPESSGGSSGGSDKKYSIGLAIGTNSVGWAVITDEYKVPSK
KFKVLGNTDRHSIKKNLIGALLFDSGETAEATRLKRTARRRYTRRKNRICYLQEIF
SNEMAKVDDSFFHRLEESFLVEEDKKHERHPIFGNIVDEVAYHEKYPTIYHLRKK
LVDSTDKADLRLIYLALAHMIKFRGHFLIEGDLNPQNSDVDKLFIQLVQTYNQLFE
ENPINASGVDAKAILSARLSKSRRLENLIAQLPGEKKNGLFGNLIALSLGLTPNFK
SNFDLAEDAKLQLSKDTYDDDLDNLLAQIGDQYADLFLAAKNLSDAILLSDILRVN
TEITKAPLSASMIKRYDEHHQDLTLLKALVRQQLPEKYKEIFFDQSKNGYAGYID
GGASQEEFYKFIKPILEKVIDGTEELLVKLNREDLLRKQRTFDNGSPHQIFILGEL
HAILRRQEDFYPFLKDNREKIEKILTFRIPYYVGPLARGNSRFAWMTRKSEETITP
WNFEEVVDKGASAQSFIERNATNFDKNLPNEKVLPKHSLLYEYFTVYNELTKVKY
VTEGMRKPAFLSGEOKKANDLLFKTNRKVTVKQLKEDYFKKIECFDSVEISGVE
DRFNASLGTYHDLLKIIKDKDFLDNEENEDILEDIVLTLTLFEDREMIEERLKTYAH
LFDDKVMKQLKRRRYTGWGRLSRKLINGIRDKQSGKTILDFLKSDGFANRNFM
QLIHDDSLTFKEDEQKAQVSGQGDSLHEHIANLAGSPAIKKGELQTVKVVDELVK
VMGRHKPENIVIEMARENUTQKGQKNSRERNAKRIEEGEKELGSQLKEHPVEN
TQLQNEKLYLYYLQNGRDIMYVDQELDINIRLSDYDVDHIVPQSFLKDDSIDNKVL
TRSDKNRGKSDNVPSEEVVKKMKNYVVRQLLNAKLETQRKFDNLTKAERGGLSE
LDKAGFEKROLVETRQETKHVAQILDSRMNTKYDENDKLIREVKVITLKSKLVSDF
RKDFQFYKVREINNYHHAHDAYLNAVVGTALIKKYPKLESEFVYGDYKVYDVRK
MIAKSEQEIGKATAKYFFYSNIMNFFKTEETLANGEERKRPLIETNGETGEIVWDK
GRDFATVRKVLSMPQVNIVKIKTEVQTGGFSKESILPKRNSDKLIARKKDWDPKK
YGGFDSPTVAYSVLWAKVEKGKSIKKLKSVKELLGITIMERSSFEKNPIDFLEAK
GYKEVKKDLIIKLPKYSLFELENGRKRMLASAGELQKGNELALPSKYVNFLYLAS
HYEKLKGSPEDNEQKQLFVEQHKHYLDEHEQISEFSKRVILADANLDKVLSAYN
KHRDKPIREQAENIIHLFTLTNLGAPAAFKYFDTTIDRKRYTSTKEVLDATLIFIQSI
TGLYETRIDLSQLGGDSGGSPIKKIKRKV
ABE7.10, SEQ ID: 139
MSEVEFSHEYWMRHALTLAKRAWDEREVPVGAVLVHNNRVIGEGWNRPIGRH
DPTAHAEIMALRQGGLVMQNYRLIDATLYVTLEPCVMCAGAMIHSRIGRVVFGA
RDAKTGAAGSLNADVLHHPGMNHRVEITEGILADECAALLSDFFRNARRQEIKAQK
KAQSSTDSGGSSGGSSGSETPGTSESATPESSGGSSGGSSEVEFSHEYWNAR
HALTLAKRARDEREVPVGAVLVLANRVIGEGWNRAIGLHDPTAHAEIMALRQG
GLVMQNYRLIDATLYVTFEPCVMCAGAMIHSRIGRVVFGVRNAKTGAAGSLMD
VLHYPGVINHRVEITEGILADECAALLCYFFRIMPRQVFNAQKKAQSSTDSGGSS
GGSSGSETPGTSESATPESSGGSSGGSDKKYSIGLAIGTNSVGWAVITDEYKV
PSKKFKVLGNTDRHSIKKNLIGALLFDSGETAEATRLKRTARRRYTRRKNRICYL
QEIFSNEMAKVDDSFFHRLEESFLVEEDKKHERHPIFGNIVDEVAYHEKYPTIYH
LRKKLVDSTDKADLRLIYLALAHMIKFRGHFLIEGDLNPDNSDVDKLFIQLVQTYN
QLFEENPINASGVDAKAILSARLSKSRRLENLIAQLPGEKKNGLFGNLIALSLGLT
PNFKSNFDLAEDAKLQLSKOTYDDDLDNLLAQIGDQYADLFLAAKNLSDAILLSDI
LRVNTEITKAPLSASMIKRYDEHHQDLTLLKALVRQQLPEKYKEIFFDQSKNGYA
GYIDGGASQEEFYKFIKPILEKVIDGTEELLVKLNREDLLRKQRTFDNGSIPHQIHL
GELHAILRRQEDFYPFLKDNREKIEKILTFRIPYYVGPLARGNSRFAWMTRKSEE
TITPWNFEEVVDKGASAQSFIERMTNFDKNLPNEKVLPKHSLLYEYFTVYNELTK
VKYVTEGMRKPAFLSGEQKKANDLIFKTNRKVTVKQLKEDYFKKIECEDSVEIS
GVEDRFNASLGTYHDLLKIIKDKDFLDNEENEDILEDIVLTLTLFEDREMIEERLKT
YAHLFDDKVIMKQLKRRRYTGWGRLSRKLINGIRDKQSGKTILDFLKSDGFANRN
FMQLIHDDSLTFKEDICKAQVSGQGDSLHEHIANLAGSPAIKKGILQTVKVVDEL
VKVMGRHKPENIVIEMARENQTTOKGQKNSRERIMKRIEEGIKELGSQILKEHPV
ENTQLQNEKLYLYYLQNGRDMYVDQELDINRLSDYDVDHIVPQSFLKDDSIDNK
VLTRSDKNRGKSDNVPSEEVVKKMKNYWRQLLNAKLITQRKFDNLTKAERGGL
SELDKAGFIKRQLVETRQITKHVAQILDSRMNTKYDENDKLIREVKVITLKSKLVS
DFRKDFQFYKVREINNYHHAHDAYLNAVVGTALIKKYPKLESEFVYGDYKVYDV
RKIMIAKSEQEIGKATAKYFFYSNIMNFFKTEITLANGEIRKRPLIETNGETGEIVW
DKGRDFATVRKVLSIMPQVNIVKKTEVQTGGFSKESILPKRNSDKLIARKKDWDP
KKYGGFDSPTVAYSVLVVAKVEKGKSKKLKSVKELLGITEMERSSFEKNPIDFLE
AKGYKEVKKDLIIKLPKYSLFELENGRKRNALASAGELQKGNELALPSKYVNFLYL
ASHYEKLKGSPEDNEQKQLFVEQHKHYLDEIIEQISEFSKRVILADANLDKVLSA
YNKHRDKPIREQAENIIHLFTLTNLGAPAAFKYFDTTIDRKRYTSTKEVLDATLIH
QSITGLYETRIDLSQLGGDSGGSPKKKRKV
SPACE, SEQ ID NO: 140
MKRTADGSEFESPKKKRKVSEVEFSHEYWNARHALTLAKRARDEREVPVGAVL
VLNNRVIGEGWNRAIGLHDPTAHAEIMALRQGGLVMQNYRLIDATLYGTFEPCV
MCAGAMIHSRIGRVVFGVRNAKTGAAGSLMDVLHYPGMNHRVEITEGILADEC
AALLCYFFRMPRQVFNAQKKAQSSTDSGGSSGGSSGSETPGTSESATPESSG
GSSGGSDKKYSIGLAIGTNSVGWAVITDEYKVPSKKFKVLGNTDRHSIKKNLIGA
LLFDSGETAEATRLKRTARRRYTRRKNRICYLQEIFSNEMAKVDDSFFHRLEES
FLVEEDKKHERHPIFGNIVDEVAYHEKYPTIYHLRKKLVDSTDKADLRLIYLALAH
MIKFRGHFLIEGDLNPQNSDVDKLFIQLVQTYNQLFEENPINASGVDAKAILSARL
SKSRRLENLIAQLPGEKKNGLFGNLIALSLGLTPNFKSNFDLAEDAKLQLSKDTY
DDDLDNLLAQIGDQYADLFLAAKNLSDAILLSDILRVNTEITKAPLSASMIKRYDE
HHQDLTLLKALVRQQLPEKYKEIFFDQSKNGYAGYIDGGASQEEFYKFIKPILEK
MDGTEELLVKLNREDLLRKQRTFDNGSIPHQIHLGELHAILRRQEDFYPFLKDN
REKIEKILTFRIPYYVGPLARGNSRFAWMTRKSEETITPWNFEEVVDKGASAQS
FIERMTNFDKNLPNEKVLPKHSLLYEYFTVYNELTKVKYVTEGMRKPAFLSGEQ
KKANDLLFKTNRKVTVKQLKEDYFKKIECFDSVEISGVEDRFNASLGTYHDLLKII
KDKDFLDNEENEDILEDIVLTLTLFEDREMIEERLKTYAHLFDDKVMKQLKRRRY
TGWGRLSRKLINGIRDKQSGKTILDFLKSDGFANRNFMQLIHDDSLTFKEDIQKA
QVSGQGDSLHEHIANLAGSPAIKKGILQTVKVVDELVKVMGRHKPENIVIEMARE
NQTTQKGQKNSRERMKRIEEGIKELGSQILKEHPVENTQLQNEKLYLYYLQNGR
DMYVDQELDINIRLSQYDVDHIVPQSFLKDDSIDNKVLTRSDKNRGKSDNVPSEE
VVKKMKNYWRQLLNAKLITQRKFDNLTKAERGGLSELDKAGFIKRQLVETRQIT
KHVAQILDSRMNTKYDENDKLIREVKVITLKSKLVSDFRKDFQFYKVREINNYHH
AHDAYLNAVVGTALIKKYPKLESEFVYGDYKVYDVRKMIAKSEQEIGKATAKYFF
YSNIMNFFKTEITLANGEIRKRPLIETNGETGEIVWDKGRDFATVRKVLSMPQVN
IVKKTEVQTGGFSKESILPKRNSDKLIARKKENVDPKKYGGFDSPTVAYSVLVVA
KVEKGKSKKLKSVKELLGITIMERSSFEKNPIDFLEAKGYKEVKKDLIIKLPKYSLF
ELENGRKRMLASAGELQKGNELALPSKYVNFLYLASHYEKLKGSPEDNEQKQL
FVEQHKHYLDEIIEQISEFSKRVILADANLDKVLSAYNKHRDKPIREQAENIIHLFT
LTNLGAPAAFKYFDTTIDRKRYTSTKEVLDATLIHQSITGLYETRIDLSQLGGDSG
GSKRTADGSEFEPKKKRKVSGGSSGGSSGSETPGTSESATPESSGGSSGGST
DAEYVRIHEKLDIYTFKKQFFNNKKSVSHRCYVLFELKRRGERRACFWGYAVN
KPQSGTERGIHAEIFSIRKVEEYLRDNPGQFTINWYSSWSPCADCAEKILEWYN
QELRGNGHTLKIWACKLYYEKNARNQIGLWNLRDNGVGLNVMVSEHYQCCRKI
FIQSSHNQLNENRWLEKTLKRAEKWRSELSIMIQVKILHTTKSPAVSGGSGGSG
GSTNLSDIIEKETGKQLVIQESILMLPEEVEEVIGNKPESDILVHTAYDESTDENV
WILLTSDAPEYKPWALVIQDSNGENKIKMLSGGSGGSGGSTNLSDIIEKETGKQL
VIQESILMLPEEVEEVIGNKPESDILVHTAYDESTDENVMLLTSDAPEYKPWALVI
QDSNGENKIKNALGSGATNFSLLKQAGDVEENPGPMVSKGEELFTGVVPILVEL
DGDVNGHKFSVSGEGEGDATYGKLTLKFICTTGKLPVPWPTLVTTLTYGVQCF
SRYPDHMKOHDFFKSAMPEGYVQERTIFFKDDGNYKTRAEVKFEGDTLVNRIE
LKGIDFKEDGNILGHKLEYNYNSHNVYIMADKQKNGIKVNFKIRHNIEDGSVQLA
DHYQQNTPIGDGPVLLPDNHYLSTQSALSKDPNEKRDHMVLLEFVTAAGITLGNA
DELYKSGGSPKKKRK
SPACEΔUGI, SEQ ID NO: 141
MKRTADGSEFESPKKKRKVSEVEFSHEYWNARHALTLAKRARDEREVPVGAVL
VLNNRVIGEGWNRAIGLHDPTAHAEIMALRQGGLVMQNYRLIDATLYGTFEPCV
MCAGAMIHSRIGRVVFGVRNAKTGAAGSLIMDVLHYPGMNHRVEITEGILADEC
AALLCYFFRMPRQVFNAQKKAQSSTDSGGSSGGSSGSETPGTSESATPESSG
GSSGGSDKKYSIGLAIGTNSVGWAVITDEYKVPSKKFKVLGNTDRHSIKKNLIGA
LLFDSGETAEATRLKRTARRRYTRRKNRICYLQEIFSNEMAKVDDSFFHRLEES
FLVEEDKKHERHPIFGNIVDEVAYHEKYPTIYHLRKKLVDSTDKADLRLIYLALAH
MIKFRGHFLIEGDLNPDNSDVDKLFIQLVQTYNQLFEENPINASGVDAKAILSARL
SKSRRLENLIAQLPGEKKNGLFGNLIALSLGLTPNFKSNFDLAEDAKLQLSKDTY
DDDLDNLLAQIGDQYADLFLAAKNLSDAILLSDILRVNTEITKAPLSASMIKRYDE
HHQDLTLLKALVRQQLPEKYKEIFFDQSKNGYAGYIDGGASQEEFYKFIKPILEK
MDGTEELLVKLNREDLLRKQRTFDNGSIPHQIHLGELHAILRRQEDFYPFLKDN
REKIEKILTFRIPYYVGPLARGNSRFAWMTRKSEETITPWNFEEVVDKGASAQS
FIERMTNFDKNLPNEKVLPKHSLLYEYFTVYNELTKVKYVTEGMRKPAFLSGEQ
KKANDLLFKTNRKVTVKQLKEDYFKKIECFDSVEISGVEDRFNASLGTYHDLLKII
KDKDFLDNEENEDILEDIVLTLTLFEDREMIEERLKTYAHLFDDKVMKQLKRRRY
TGWGRLSRKLINGIRDKQSGKTILDFLKSDGFANRNFMQLIHDDSLTFKEDIQKA
QVSGQGDSLHEHIANLAGSPAIKKGILQTVKVVDELVKVMGRHKPENIVIEMARE
NQTTQKGQKNSRERMKRIEEGIKELGSQILKEHPVENTQLQNEKLYLYYLQNGR
DMYVDQELDINIRLSDYDVDHIVPQSFLKDDSIDNKVLTRSDKNRCKSDNVPSEE
VVKKMKNYWRQLLNAKLITQRKFDNLTKAERGGLSELDKAGFIKRQLVETRQIT
KHVAQILDSRMNTKYDENDKLIREVKVITLKSKLVSDFRKDFQFYKVREINNYHH
AHDAYLNAVVGTALIKKYPKLESEFVYGDYKVYDVRKMIAKSEQEIGKATAKYFF
YSNIMNFFKTEITLANGEIRKRPLIETNGETGEIVWDKGRDFATVRKVLSMPQVN
IVKKTEVQTGGFSKESILPKRNSDKLIARKKDWDPKKYGGFDSPTVAYSVLVVA
KVEKGKSKKLKSVKELLGITIMERSSFEKNPIDFLEAKGYKEVKKDLIIKLPKYSLF
ELENGRKRMLASAGELQKGNELALPSKYVNFLYLASHYEKLKGSPEDNEQKQL
FVEQHKHYLDEHEQISEFSKRVILADANLDKVLSAYNKHRDKPIREQAENIIHLFT
LTNLGAPAAFKYFDTTIDRKRYTSTKEVLDATLIHQSITGLYETRIDLSQLGGDSG
GSKRTADGSEFEPKKKRKVSGGSSGGSSGSETPGTSESATPESSGGSSGGST
DAEYVRIHEKLDIYTFKKQFFNNKKSVSHRCYVLFELKRRGERRACFWGYAVN
KPQSGTERGIHAEIFSIRKVEEYLRDNPGQFTINWYSSWSPCADCAEKILEWYN
QELRGNGHTLKIWACKLYYEKNARNQIGLWNLRDNGVGLNVMVSEHYQCCRKI
FIQSSHNQLNENRWLEKTLKRAEKWRSELSIMIQVKILHTTKSPAVGSGATNFSL
LKQAGDVEENPGPMVSKGEELFTGVVPILVELDGDVNGHKFSVSGEGEGDATY
GKLTLKFICTTGKLPVPWPTLVTTLTYGVQCFSRYPDHMKQHDFFKSAIMPEGY
VQERTIFFKDDGNYKTRAEVKFEGDTLVNRIELKGIDFKEDGNILGHKLEYNYNS
HNVYIMADKQKNGIKVNFKIRHNIEDGSVQLADHYQQNTPIGDGPVLLPDNHYL
STQSALSKDPNEKRDHMVLLEFVTAAGITLGNADELYKSGGSPKKKRKV
SPACE-NG, SEQ ID NO: 142
MKRTADGSEFESPKKKRKVSEVEFSHEYWNARHALTLAKRARDEREVPVGAVL
VLNNRVIGEGWNRAIGLHDPTAHAEIMALRQGGLVMQNYRLIDATLYGTFEPCV
MCAGAMIHSRIGRVVFGVRNAKTGAAGSLIMDVLHYPGMNHRVEITEGILADEC
AALLCYFFRMPRQVFNAQKKAQSSTDSGGSSGGSSGSETPGTSESATPESSG
GSSGGSDKKYSIGLAIGTNSVGWAVITDEYKVPSKKFKVLGNTDRHSIKKNLIGA
LLFDSGETAEATRLKRTARRRYTRRKNRICYLQEIFSNEMAKVDDSFFHRLEES
FLVEEDKKHERHPIFGNIVDEVAYHEKYPTIYHLRKKLVDSTDKADLRLIYLALAH
MIKFRGHFLIEGDLNPDNSDVDKLFIQLVQTYNQLFEENPINASGVDAKAILSARL
SKSRRLENLIAQLPGEKKNGLFGNLIALSLGLTPNFKSNFDLAEDAKLQLSKDTY
DDDLDNLLAQIGDQYADLFLAAKNLSDAILLSDILRVNTEITKAPLSASMIKRYDE
HHQDLTLLKALVRQQLPEKYKEIFFDQSKNGYAGYIDGGASQEEFYKFIKP1LEK
MDGTEELLVKLNREDLLRKQRTFDNGSIPHQIHLGELHAILRRQEDFYPFLKDN
REKIEKILTFRIPYYVGPLARGNSRFAWMTRKSEETITPWNFEEVVDKGASAQS
FIERMTNFDKNLPNEKVLPKHSLLYEYFTVYNELTKVKYVTEGMRKPAFLSGEQ
KKANDLLFKTNRKVTVKQLKEDYFKKIECFDSVEISGVEDRFNASLGTYHDLLKII
KDKDFLDNEENEDILEDIVLTLTLFEDREMIEERLKTYAHLFDDKVMKQLKRRRY
TGWGRLSRKLINGIRDKQSGKTILDFLKSDGFANRNFNAQLIHDDSLTFKEDIQKA
QVSGQGDSLHEHIANLAGSPAIKKGILQTVKVVDELVKVMGRHKPENIVIEMARE
NQTTQKGQKNSRERMKRIEEGIKELGSQILKEHPVENTQLQNEKLYLYYLQNGR
DMYVDQELDINRLSDYDVDHIVPQSFLKDDSIDNKVLTRSDKNRGKSDNVPSEE
VVKKMKNYWRQLLNAKLITQRKFDNLTKAERGGLSELDKAGFIKRQLVETRQIT
KHVAQILDSRMNTKYDENDKLIREVKVITLKSKLVSDFRKDFQFYKVREINNYHH
AHDAYLNAVVGTALIKKYPKLESEFVYGDYKVYDVRKMIAKSEQEIGKATAKYFF
YSNIMNFFKTEITLANGEIRKRPLIETNGETGEIVWDKGRDFATVRKVLSMPQVN
IVKKTEVQTGGFSKESIRPKRNSDKLIARKKDWDPKKYGGFVSPTVAYSVLVVA
KVEKGKSKKLKSVKELLGITIMERSSFEKNPIDFLEAKGYKEVKKDLIIKLPKYSLF
ELENGRKRMLASARFLQKGNELALPSKYVNFLYLASHYEKLKGSPEDNEQKQL
FVEQHKHYLDENEQISEFSKRVILADANLDKVLSAYNKHRDKPIREQAENIIHLFT
LTNLGAPRAFKYFDTTIDRKVYRSTKEVLDATLIHQSITGLYETRIDLSQLGGDSG
GSKRTADGSEFEPKKKRKVSGGSSGGSSGSETPGTSESATPESSGGSSGGST
DAEYVRIHEKLDIYTFKKOFFNNKKSVSHRCYVLFELKRRGERRACFWGYAVN
KPQSGTERGIHAEIFSIRKVEEYLRDNPGQFTINWYSSWSPCADCAEKILEWYN
QELRGNGHTLKIWACKLYYEKNARNQIGLWNLRDNGVGLNVMVSEHYQCCRKI
FIQSSHNQLNENRWLEKTLKRAEKWRSELSIMIQVKILHTTKSPAVSGGSGGSG
GSTNLSDIIEKETGKQLVIQESILMLPEEVEEVIGNKPESDILVHTAYDESTDENV
WILLTSDAPEYKPWALVIQDSNGENKIKMLSGGSGGSGGSTNLSDHEKETGKQL
VIQESILMLPEEVEEVIGNKPESDILVHTAYDESTDENVMLLTSDAPEYKPWALVI
QDSNGENKIKMLGSGATNFSLLKQAGDVEENPGPMVSKGEELFTGVVPILVEL
DGDVNGHKFSVSGEGEGDATYGKLTLKFICTTGKLPVPWPTLVTTLTYGVQCF
SRYPDHIMKQHDFFKSAMPEGYVQERTIFFKDDGNYKTRAEVKFEGDTLVNRIE
LKGIDFKEDGNILGHKLEYNYNSHNVYIMADKQKNGIKVNFKIRHNIEDGSVQLA
DHYQQNTPIGDGPVLLPDNHYLSTQSALSKDPNEKRDHMULLEFVTAAGITLGIM
DELYKSGGSPKKKRKV
SPACE-VRQR, SEQ ID NO: 143
MKRTADGSEFESPKKKRKVSEVEFSHEYWNARHALTLAKRARDEREVPVGAVL
VLNNRVIGEGWNRAIGLHDPTAHAEIMALRQGGLVMQNYRLIDATLYGTFEPCV
MCAGAMIHSRIGRVVFGVRNAKTGAAGSLIMDVLHYPGMNHRVEITEGILADEC
AALLCYFFRMPRQVFNAQKKAQSSTDSGGSSGGSSGSETPGTSESATPESSG
GSSGGSDKKYSIGLAIGTNSVGWAVITDEYKVPSKKFKVLGNTDRHSIKKNLIGA
LLFDSGETAEATRLKRTARRRYTRRKNRICYLQEIFSNEMAKVDDSFFHRLEES
FLVEEDKKHERHPIFGNIVDEVAYHEKYPTIYHLRKKLVDSTDKADLRLIYLALAH
MIKFRGHFLIEGDLNPDNSDVDKLFIQLVQTYNQLFEENPINASGVDAKAILSARL
SKSRRLENLIAQLPGEKKNGLFGNLIALSLGLTPNFKSNFDLAEDAKLQLSKDTY
DDDLDNLLAQIGDQYADLFLAAKNLSDAILLSDILRVNTEITKAPLSASMIKRYDE
HHQDLTLLKALVRQQLPEKYKEIFFDQSKNGYAGYIDGGASQEEFYKFIKPILEK
MDGTEELLVKLNREDLLRKQRTFDNGSIPHQIHLGELHAILRRQEDFYPFLKDN
REKIEKILTFRIPYYVGPLARGNSRFAWMTRKSEETITPWNFEEVVDKGASAQS
FIERMTNFDKNLPNEKVLPKHSLLYEYFTVYNELTKVKYVTEGMRKPAFLSGEQ
KKANDLLFKTNRKVTVKQLKEDYFKKIECFDSVEISGVEDRFNASLGTYHDLLKII
KDKDFLDNEENEDILEDIVLTLTLFEDREMIEERLKTYAHLFDDKVMKQLKRRRY
TGWGRLSRKLINGIRDKQSGKTILDFLKSDGFANRNFNAQLIHDDSLTFKEDIQKA
QVSGQGDSLHEHIANLAGSPAIKKGILQTVKVVDELVKVMGRHKPENIVIEMARE
NQTTQKGQKNSRERMKRIEEGIKELGSQ1LKEHPVENTQLQNEKLYLYYLQNGR
DMYVDQELDINRLSDYDVDHIVPQSFLKDDSIDNKVLTRSDKNRGKSDNVPSEE
VVKKMKNYWRQLLNAKLITQRKFDNLTKAERGGLSELDKAGFIKRQLVETRQIT
KHVAQILDSRMNTKYDENDKLIREVKVITLKSKLVSDFRKDFQFYKVREINNYHH
AHDAYLNAVVGTALIKKYPKLESEFVYGDYKVYDVRKMIAKSEQEIGKATAKYFF
YSNIMNFFKTEITLANGEIRKRPLIETNGETGEIVWDKGRDFATVRKVLSMPQVN
IVKKTEVQTGGFSKESILPKRNSDKLIARKKDWDPKKYGGFVSPTVAYSVLVVA
KVEKGKSKKLKSVKELLGITIMERSSFEKNPIDFLEAKGYKEVKKDLIIKLPKYSLF
ELENGRKRMLASARELQKGNELALPSKYVNFLYLASHYEKLKGSPEDNEQKQL
FVEQHKHYLDENEQISEFSKRVILADANLDKVLSAYNKHRDKPIREQAENIIHLFT
LTNLGAPAAFKYFDTTIDRKQYRSTKEVLDATLIHQSITGLYETRIDLSQLGGDSG
GSKRTADGSEFEPKKKRKVSGGSSGGSSGSETPGTSESATPESSGGSSGGST
DAEYVRIHEKLDIYTFKKQFFNNKKSVSHRCYVLFELKRRGERRACFWGYAVN
KPQSGTERGIHAEIFSIRKVEEYLRDNPGQFTINWYSSWSPCADCAEKILEWYN
QELRGNGHTLKIWACKLYYEKNARNQIGLWNLRDNGVGLNVMVSEHYQCCRKI
FIQSSHNQLNENRWLEKTLKRAEKWRSELSIMIQVKILHTTKSPAVSGGSGGSG
GSTNLSDIIEKETGKQLVIQESILMLPEEVEEVIGNKPESDILVHTAYDESTDENV
WILLTSDAPEYKPWALVIQDSNGENKIKMLSGGSGGSGGSTNLSDHEKETGKQL
VIQESILMLPEEVEEVIGNKPESDILVHTAYDESTDENVMLLTSDAPEYKPWALVI
QDSNGENK1KMLGSGATNFSLLKQAGDVEENPGPMVSKGEELFTGVVPILVEL
DGDVNGHKFSVSGEGEGDATYGKLTLKFICTTGKLPVPWPTLVTTLTYGVQCF
SRYPDHIMKQHDFFKSAMPEGYVQERTIFFKDDGNYKTRAEVKFEGDTLVNRIE
LKGIDFKEDGNILGHKLEYNYNSHNVYIMADKQKNGIKVNFKIRHNIEDGSVQLA
DHYQQNTPIGDGPVLLPDNHYLSTQSALSKDPNEKRDHMVLLEFVTAAGITLGM
DELYKSGGSPKKKRKV
SPACE-NAA, SEQ ID NO: 144
MKRTADGSEFESPKKKRKVSEVEFSHEYWNARHALTLAKRARDEREVPVGAVL
VLNNRVIGEGWNRAIGLHDPTAHAEIMALRQGGLVMQNYRLIDATLYGTFEPCV
MCAGAMIHSRIGRVVFGVRNAKTGAAGSLIMDVLHYPGMNHRVEITEGILADEC
AALLCYFFRMPRQVFNAQKKAQSSTDSGGSSGGSSGSETPGTSESATPESSG
GSSGGSDKKYSIGLAIGTNSVGWAVITDEYKVPSKKFKVLGNTDRHSEKKNLIGA
LLFDSGETAEATRLKRTARRRYTRRKNRICYLQEIFSNEMAKVDDSFFHRLEES
FLVEEDKKHERHPIFGNIVDEVAYHEKYPTIYHLRKKLVDSTDKADLRLIYLALAH
MIKFRGHFLIEGDLNPDNSDVDKLFIQLVQTYNQLFEENPINASGVDAKAILSARL
SKSRRLENLIAQLPGEKKNGLFGNLIALSLGLTPNFKSNFDLAEDAKLQLSKDTY
DDDLDNLLAQIGDQYADLFLAAKNLSDAILLSDILRVNTEITKAPLSASMIKRYDE
HHQDLTLLKALVRQQLPEKYKEIFFDQSKNGYAGYIDGGASQEEFYKFIKPILEK
MDGTEELLVKLAREDLLRKQRTFDNGSIPHQIHLGELHAILRRQEDFYPFLKDN
REKIEKILTFRIPYYVGPLARGNSRFAWMTRKSEETITPWNFEEVVDKGASAQS
FIERMTNFDKNLPNEKVLPKHSLLYEYFTVYNELTKVKYVTEGMRKPAFLSGEQ
KKANDLLFKTNRKVTVKQLKEDYFKKIECFDSVEISGVEDRFNASLGTYHDLLKII
KDKDFLDNEENEDILEDIVLTLTLFEDREMIEERLKTYAHLFDDKVMKQLKRRRY
TGWGRLSRKLINGIRDKQSGKTILDFLKSDGFANRNFNAQUHDDSLTFKEDIQKA
QVSGQGDSLHEHIANLAGSPAIKKGILQTVKVVDELVKVMGRHKPENIVIEMARE
NQTTQKGQKNSRERMKRIEEGIKELGSQILKEHPVENTQLQNEKLYLYYLQNGR
DMYVDQELDINRLSDYDVDHIVPQSFLKDDSIDNKVLTRSDKNRGKSDNVPSEE
VVKKMKNYWRQLLNAKLITQRKFDNLTKAERGGLSELDKAGFIKRQLVETRQIT
KHVAQILDSRMNTKYDENDKLIREVKVITLKSKLVSDFRKDFQFYKVREINNYHH
AHDAYLNAVVGTALIKKYPKLESEFVYGDYKVYDVRKMIAKSEQEIGKATAKYFF
YSNIMNFFKTEITLANGEIRKRPLIETNGETGEIVWDKGRDFATVRKVLSMPQVN
IVKKTEIQTVGQNGGLFDDNPKSPLEVTPSKLVPLKKELNPKKYGGYQKPTTAY
PVLLITDTKQLIPISVMNKKQFEQNPVKFLRDRGYQQVGKNDFIKLPKYTLVDIG
DGIKRLWASSKEIHKGNQLVVSKKSOILLYHAHHLDSDLSNDYLQNHNQQFDVL
FNEMSFSKKOKLGKEHIQKIENVYSNKKNSASIEELAESFIKLLGFTQLGATSPFN
FLGVKLNQKQYKGKKDYILPCTEGTLIRQSITGLYETRVDLSKIGEDSGGSKRTA
DGSEFEPKKKRKVSGGSSGGSSGSETPGTSESATPESSGGSSGGSTDAEYVR
IHEKLDIYTFKKQFFNNKKSVSHRCYVLFELKRRGERRACFWGYAVNKPQSGT
ERGIHAEIFSIRKVEEYLRDNPGQFTINWYSSWSPCADCAEKILEVVYNQELRGN
GHTLKIWACKLYYEKNARNQIGLWNLRDNGVGLNVMVSEHYQCORKIFIQSSH
NQLNENRWLEKTLKRAEKWRSELSIMIQVKILHTTKSPAVSGGSGGSGGSTNL
SDIIEKETGKQLVIQESILIMLPEEVEEVIGNKPESDILVHTAYDESTDENVMLLTS
DAPEYKPWALVIQDSNGENKIKMLSGGSGGSGGSTNLSDHEKETGKQLVIQESI
LMLPEEVEEVIGNKPESDILVHTAYDESTDENVMLLTSDAPEYKPWALVIQDSN
GENKIKMLGSGATNFSLLKQAGDVEENPGPMVSKGEELFTGVVPILVELDGDV
NGHKFSVSGEGEGDATYGKLTLKFICTTGKLPVPWPTLVTTLTYGVQCFSRYP
DHMKQHDFFKSAMPEGYVQERTIFFKDDGNYKTRAEVKFEGDTLVNRIELKGID
FKEDGNILGHKLEYNYNSHNVYIMADKQKNGIKVNFKIRHNIEDGSVQLADHYQ
QNTPIGDGPVLLPDNHYLSTQSALSKDPNEKRDHMVLLEFVTAAGITLGMDELY
KSGGSPKKKRKV
TadA*(ABE8e), SEQ ID NO: 145
SEVEFSHEYWNARHALTLAKRARDEREVPVGAVLVLNNRVEGEGWNRAIGLHDP
TAHAEIMALRQGGLVMQNYRLIDATLYVTFEPCVMCAGAMIHSRIGRVVFGVRN
SKRGAAGSLANVLNYPGWINHRVEITEGILADECAALLCDFYRMPRQVFNAQKK
AQSSIN
TadA*(ABE8e_V82G), SEQ ID NO: 146
SEVEFSHEYWNARHALTLAKRARDEREVPVGAVLVLNNRVEGEGWNRAIGLHDP
TAHAEIMALRQGGLVMQNYRLIDATLYGTFEPCVMCAGAMIHSREGRVVFGVRN
SKRGAAGSLMNVLNYPGMNHRVEITEGILADECAALLCDFYRMPRQVFNAQKK
AQSSIN
TadA*(ABE8e_K20A/R21A), SEQ ID NO: 147
SEVEFSHEYWMRHALTLAAAARDEREVPVGAVLVLNNRVIGEGWNRAIGLHDP
TAHAEIMALRQGGLVMQNYRLIDATLYVTFEPCVMCAGAMIHSRIGRVVFGVRN
SKRGAAGSLMNVLNYPGMNHRVEITEGILADECAALLCDFYRMPRQVFNAQKK
AQSSIN
TadA* (ABE8.8), SEQ ID NO: 148
SEVEFSHEYWMRHALTLAKRARDEREVPVGAVLVLNNRVIGEGWNRAIGLHDP
TAHAEIMALRQGGLVMQNYRLIDATLYVTFEPCVMCAGAMIHSRIGRVVFGVRN
AKTGAAGSLMDVLHHPGMNHRVEITEGILADECAALLORFFRMPRRVFNAQKK
AQSSTD
TadA* (ABE8.13), SEQ ID NO: 149
SEVEFSHEYWMRHALTLAKRARDEREVPVGAVLVLNNRVIGEGWNRAIGLHOP
TAHAEIMALRQGGLVMQNYRLYDATLYVTFEPCVMCAGAMIHSRIGRVVFGVR
NAKTGAAGSLADVLHHPGVINHRVEITEGILADECAALLORFFRMPRRVFNAQK
KAQSSTD
TadA* (ABE8.17), SEQ ID NO: 150
SEVEFSHEYWMRHALTLAKRARDEREVPVGAVLVLNNRVIGEGWNRAIGLHOP
TAHAEIMALRQGGLVMQNYRLIDATLYSTFEPCVVICAGAMIHSRIGRVVFGVRN
AKTGAAGSLMDVLHYPGMNHRVEITEGILADECAALLCYFFRMPRRVFNAQKK
AQSSTD
TadA* (ABE8.20), SEQ ID NO: 151
SEVEFSHEYWIMRHALTLAKRARDEREVPVGAVLVLNNRVIGEGWNRAIGLHDP
TAHAEIMALRQGGLVMQNYRLYDATLYSTFEPCVMCAGAMIHSRIGRVVFGVR
NAKTGAAGSLMDVLHHPGMNHRVEITEGILADECAALLCRFFRMPRRVFNAQK
KAQSSTD
rAPOBEC1(FERNY), SEQ ID NO: 152
FERNYDPRELRKETYLLYEIKWGKSGKLWRHWCQNNRTQHAEVYFLENIFNAR
RFNPSTHCSITWYLSWSPCAECSQKIVDFLKEHPNVNLEIYVARLYYHEDERNR
QGLRDLVNSGVTIRIMDLPDYNYCWKTFVSDQGGDEDYWPGHFAPWIKQYSL
KL
rAPOBEC1(evoFERNY), SEQ ID NO: 153
FERNYDPRELRKETYLLYEIKWGKSGKLWRHWCQNNRTQHAEVYFLENIFNAR
RFNPSTHCSITWYLSWSPCAECSQKEVDFLKEHPNVNLEEYVARLYYPENERNR
QGLRDLVNSGVTIRIMDLPDYNYCWKTFVSDQGGDEDYWPGHFAPWIKQYSL
KL
rAPOBEC1(YE1), SEQ ID NO: 154
SSETGPVAVDPTLRRRIEPHEFEVFFDPRELRKETCLLYEINWGGRHSIWRHTS
QNTNKHVEVNFIEKFTTERYFCPNTRCSITWFLSYSPCGECSRAITEFLSRYPHV
TLFIYIARLYHHADPENRQGLRDLISSGVTIQIMTEQESGYCWRNFVNYSPSNEA
HWPRYPHLWVRLYVLELYCHLGLPPOLNILRRKQPQLTFFTIALQSCHYQRLPP
HILWATGLK
rAPOBEC1(YE2), SEQ ID NO: 155
SSETGPVAVDPTLRRRIEPHEFEVFFDPRELRKETCLLYEINWGGRHSIWRHTS
QNTNKHVEVNFIEKFTTERYFCPNTRCSITWFLSYSPCGECSRAITEFLSRYPHV
TLFIYIARLYHHADPRNRQGLEDLISSGVTIQIMTEQESGYCWRNFVNYSPSNEA
HWPRYPHLWVRLYVLELYCHLGLPPOLNILRRKQPQLTFFTIALQSCHYQRLPP
HILWATGLK
rAPOBEC1(YE3), SEQ ID NO: 156
SSETGPVAVDPTLRRR1EPHEFEVFFDPRELRKETCLLYEINWGGRHSIWRHTS
ONITNKHVEVNFIEKFTTERYFCPNTRCSITWFLSYSPCGECSRAITEFLSRYPHV
TLFIYIARLYHHADPENROGLEDLISSGVTIQIMTEQESGYCWRNFVNYSPSNEA
HWPRYPHLWVRLYVLELYCHLGLPPOLNILRRKQPQLTFFTIALQSCHYQRLPP
HILWATGLK
SpRY Cas9 variant, SEQ ID NO: 157
DKKYSIGLAIGTNSVGWAVITDEYKVPSKKFKVLGNTDRHSIKKNLIGALLFDSG
ETAERTRLKRTARRRYTRRKNRICYLQEIFSNEMAKVDDSFFHRLEESFLVEED
KKHERHPIFGNIVDEVAYHEKYPTIYHLRKKLVDSTDKADLRLIYLALAHMIKFRG
HFLIEGDLNPQNSDVDKLFIQLVQTYNQLFEENPINASGVDAKAILSARLSKSRR
LENLIAQLPGEKKNGLFGNLIALSLGLTPNFKSNFDLAEDAKLQLSKDTYDDDLD
NLLAQIGDQYADLFLAAKNLSDAILLSDILRVNTEITKAPLSASMIKRYDEHHQDL
TLLKALVRQQLPEKYKEIFFDQSKNGYAGYIDGGASQEEFYKFIKPILEKMDGTE
ELLVKLNREDLLRKQRTFDNGSIPHQIHLGELHAILRRQEDFYPFLKDNREKIEKI
LTFRIPYYVGPLARGNSRFAWMTRKSEETITPWNFEEVVDKGASAQSFIERMTN
FDKNLPNEKVLPKHSLLYEYFTVYNELTKVKYVTEGMRKPAFLSGEQKKANDLL
FKTNRKVTVKQLKEDYFKKIECFDSVEISGVEDRFNASLGTYHDLLKIIKDKDFLD
NEENEDILEDIVLTLTLFEDREMIEERLKTYAHLFDDKVMKQLKRRRYTGWGRL
SRKLINGIRDKQSGKTILDFLKSDGFANRNFMLIHDDSLTFKEDIQKAQVSGQG
DSLHEHIANLAGSPAIKKGILQTVKWDELVKVMGRHKPENIVIEMARENQTTQK
GQKNSRERNAKRIEEGIKELGSQILKEHPVENTQLQNEKLYLYYLQNGRDMWD
QELDINRLSDYDVDHIVPQSFLKDDSIDNKVLTRSDKNRGKSDNVPSEEVVKKM
KNYWRQLLNAKLITQRKFDNLTKAERGGLSELDKAGFIKRQLVETRQITKHVAQI
LDSRNANTKYDENDKLIREVKVITLKSKLVSDFRKDFQFYKVREINNYHHAHDAYL
NAVVGTALIKKYPKLESEFVYGDYKVYDVRKIMIAKSEQEIGKATAKYFFYSNIMN
FFKTEITLANGEIRKRPLIETNGETGEIVWDKGRDFATVRKVLSMPQVNIVKKTE
VQTGGFSKESIRPKRNSDKLIARKKDWDPKKYGGFLWPTVAYSVIANAKVEKG
KSKKLKSVKELLGITIMERSSFEKNPIDFLEAKGYKEVKKDLIIKLPKYSLFELENG
RKRMLASAKQLQKGNELALPSKYVNFLYLASHYEKLKGSPEDNEQKQLFVEQH
KHYLDEIIEQISEFSKRVILADANLDKVLSAYNKHRDKPIREQAENIIHLFTLTRLG
APRAFKYFDTTIDPKQYRSTKEVLDATLIHQSITGLYETRIDLSQLGGD
SpG Cas9 variant, SEQ ID NO: 158
DKKYSIGLAIGTNSVGWAVITDEYKVPSKKFKVLGNTDRHSIKKNLIGALLFDSG
ETAEATRLKRTARRRYTRRKNRICYLQEIFSNEMAKVDDSFFHRLEESFLVEED
KKHERHPIFGNIVDEVAYHEKYPTIYHLRKKLVDSTDKADLRLIYLALAHMIKFRG
HFLIEGDLNPDNSDVDKLFIQLVQTYNQLFEENPINASGVDAKAILSARLSKSRR
LENLIAQLPGEKKNGLFGNLIALSLGLTPNFKSNFDLAEDAKLQLSKDTYDDDLD
NLLAQIGDQYADLFLAAKNLSDAILLSDILRVNTEITKAPLSASMIKRYDEHHQDL
TLLKALVRQQLPEKYKEIFFDQSKNGYAGYIDGGASQEEFYKFIKPILEKMDGTE
ELLVKLNREDLLRKQRTFDNGSIPHQIHLGELHAILRRQEDFYPFLKDNREKIEKI
LTFRIPYYVGPLARGNSRFAWMTRKSEETITPWNFEEVVDKGASAQSFIERMTN
FDKNLPNEKVLPKHSLLYEYFTVYNELTKVKYVTEGMRKPAFLSGEQKKAIVDLL
FKTNRKVTVKQLKEDYFKKIECFDSVEISGVEDRFNASLGTYHDLLKIIKDKDFLD
NEENEDILEDIVLTLTLFEDREMIEERLKTYAHLFDDKVMKQLKRRRYTGWGRL
SRKLINGIRDKQSGKTILDFLKSDGFANRNFMQLIHDDSLTFKEDIQKAQVSGQG
DSLHEHIANLAGSPAIKKGILQTVKVVDELVKVMGRHKPENIVIEMARENQTTQK
GQKNSRERMKRIEEGIKELGSQILKEHPVENTQLQNEKLYLYYLQNGRDMYVD
QELDINRLSQYDVDHIVPQSFLKDDSIDNKVLTRSDKNRGKSDNVPSEEVVKKM
KNYWRQLLNAKLITQRKFDNLTKAERGGLSELDKAGFIKRQLVETRQITKHVAQI
LDSRMNTKYDENDKLIREVKVITLKSKLVSDFRKDFQFYKVREINNYHHAHDAYL
NAVVGTALIKKYPKLESEFVYGDYKVYDVRKMIAKSEQEIGKATAKYFFYSNIMN
FFKTEITLANGEIRKRPLIETNGETGEIVWDKGRDFATVRKVLSMPQVNIVKKTE
VQTGGFSKESILPKRNSDKLIARKKDWDPKKYGGFLWPTVAYSVLVVAKVEKG
KSKKLKSVKELLGITIMERSSFEKNPIDFLEAKGYKEVKKDLIIKLPKYSLFELENG
RKRMLASAKQLQKGNELALPSKYVNFLYLASHYEKLKGSPEDNEQKQLFVEQH
KHYLDEIIEQISEFSKRVILADANLDKVLSAYNKHRDKPIREQAENIIHLFTLTNLG
APAAFKYFDTTIDRKQYRSTKEVLDATLIHQSITGLYETRIDLSQLGGD
pCMV-bpNLS-TadA*(ABE8e)-nCas9-bpNLS-pmCDA1(R187W)-UGI-UGI-P2A-
EGFP, SEQ ID NO: 159
MKRTADGSEFESPKKKRKVSEVEFSHEYWIMRHALTLAKRARDEREVPVGAVL
VIANRVIGEGWNRAIGLHDPTAHAEIMALRQGGLVMQNYRLIDATLYVTFEPCV
MCAGAIMIHSRIGRVVFGVRNSKRGAAGSLMNVLNYPGMNHRVEITEGILADEC
AALLCDFYRMPRQVFNAQKKAQSSINSGGSSGGSSGSETPGTSESATPESSG
GSSGGSDKKYSIGLAIGTNSVGWAVITDEYKVPSKKFKVLGNTDRHSIKKNLIGA
LLFDSGETAEATRLKRTARRRYTRRKNRICYLQEIFSNEMAKVDDSFFHRLEES
FLVEEDKKHERHPIFGNIVDEVAYHEKYPTIYHLRKKLVDSTDKADLRLIYLALAH
MIKFRGHFLIEGDLNPDNSDVDKLFIQLVQTYNQLFEENPINASGVDAKAILSARL
SKSRRLENLIAQLPGEKKNGLFGNLIALSLGLTPNFKSNFDLAEDAKLQLSKDTY
DDDLDNLLAQIGDQYADLFLAAKNLSDAILLSDILRVNTEETKAPLSASMIKRYDE
HHQDLTLLKALVRQQLPEKYKEIFFDQSKNGYAGYIDGGASQEEFYKFIKPILEK
MDGTEELLVKLNREDLLRKQRTFDNGSIPHQIHLGELHAILRRQEDFYPFLKDN
REKIEKELTFRIPYYVGPLARGNSRFAWMTRKSEETITPWNFEEVVDKGASAQS
FIERMTNFDKNLPNEKVLPKHSLLYEYFTVYNELTKVKYVTEGMRKPAFLSGEQ
KKAIVDLLFKTNRKVTVKQLKEDYFKKIECFDSVEISGVEDRFNASLGTYHDLLKII
KDKDFLDNEENEDILEDIVLTLTLFEDREMIEERLKTYAHLFDDKVMKQLKRRRY
TGWGRLSRKLINGIRDKQSGKTILDFLKSDGFANRNFNAQLIHDDSLTFKEDIQKA
QVSGQGDSLHEHIANLAGSPAIKKGILQTVKVVDELVKVMGRHKPENIVIEMARE
NQTTQKGQKNSRERMKRIEEGIKELGSQ1LKEHPVENTQLQNEKLYLYYLQNGR
DMYVDQELDINRLSDYDVDHIVPQSFLKDDSIDNKVLTRSDKNRGKSDNVPSEE
VVKKMKNYWRQLLNAKLITQRKFDNLTKAERGGLSELDKAGFIKRQLVETRQIT
KHVAQILDSRMNTKYDENDKLIREVKVITLKSKLVSDFRKDFQFYKVREINNYHH
AHDAYLNAVVGTALIKKYPKLESEFVYGDYKVYDVRKMIAKSEQEIGKATAKYFF
YSNIMNFFKTEITLANGEIRKRPLIETNGETGEIVWDKGRDFATVRKVLSMPQVN
IVKKTEVQTGGFSKESILPKRNSDKLIARKKDWDPKKYGGFDSPTVAYSVLVVA
KVEKGKSKKLKSVKELLGITIMERSSFEKNPIDFLEAKGYKEVKKDLIIKLPKYSLF
ELENGRKRMLASAGELQKGNELALPSKYVNFLYLASHYEKLKGSPEDNEQKQL
FVEQHKHYLDENEQISEFSKRVILADANLDKVLSAYNKHRDKPIREQAENIIHLFT
LTNLGAPAAFKYFDTTIDRKRYTSTKEVLDATLIHQSITGLYETRIDLSQLGGDSG
GSKRTADGSEFEPKKKRKVSGGSSGGSSGSETPGTSESATPESSGGSSGGST
DAEYVRIHEKLDIYTFKKQFFNNKKSVSHRCYVLFELKRRGERRACFWGYAVN
KPOSGTERGIHAEIFSIRKVEEYLRDNPGQFTINWYSSWSPCADCAEKILEWYN
QELRGNGHTLKIWACKLYYEKNARNQIGLWNLRDNGVGLNVMVSEHYQCCRKI
FIQSSHNQLNENRWLEKTLKRAEKWRSELSIMIQVKILHTTKSPAVSGGSGGSG
GSTNLSDHEKETGKQLVIQESILMLPEEVEEVIGNKPESDILVHTAYDESTDENV
MLLTSDAPEYKPWALVIQDSNGENKIKMLSGGSGGSGGSTNLSDIIEKETGKQL
VIQESILMLPEEVEEVIGNKPESDILVHTAYDESTDENVMLLTSDAPEYKPWALVI
QDSNGENKIKMLGSGATNFSLLKQAGDVEENPGPMVSKGEELFTGVVPILVEL
DGDVNGHKFSVSGEGEGDATYGKLTLKFICTTGKLPVPWPTLVTTLTYGVQCF
SRYPDHIMKQHDFFKSAMPEGYVQERTIFFKDDGNYKTRAEVKFEGDTLVNRIE
LKGIDFKEDGNILGHKLEYNYNSHNVYIMADKQKNGIKVNFKIRHNIEDGSVQLA
DHYQQNTPIGDGPVLLPDNHYLSTQSALSKDPNEKRDHMVLLEFVTAAGITLGIM
DELYKSGGSPKKKRKV
pCMV-bpNLS-TadA*(ABE8e)-nCas9-bpNLS-pmCDA1(R187W)-P2A-EGFP,
SEQ ID NO: 160
MKRTADGSEFESPKKKRKVSEVEFSHEYWIMRHALTLAKRARDEREVPVGAVL
VLNNRVIGEGWNRAIGLHDPTAHAEIMALRQGGLVMQNYRLIDATLYVTFEPCV
MCAGAIMIHSRIGRVVFGVRNSKRGAAGSLMNVLNYPGMNHRVEITEGILADEC
AALLCDFYRMPRQVFNAQKKAQSSINSGGSSGGSSGSETPGTSESATPESSG
GSSGGSDKKYSIGLAIGTNSVGWAVITDEYKVPSKKFKVLGNTDRHSIKKNLIGA
LLFDSGETAEATRLKRTARRRYTRRKNRECYLQEIFSNEMAKVDDSFFHRLEES
FLVEEDKKHERHPIFGNIVDEVAYHEKYPTIYHLRKKLVDSTDKADLRLIYLALAH
MIKFRGHFLIEGDLNPDNSDVDKLFIQLVQTYNQLFEENPINASGVDAKAILSARL
SKSRRLENLIAQLPGEKKNGLFGNLIALSLGLTPNFKSNFDLAEDAKLQLSKDTY
DDDLDNLLAQIGDQYADLFLAAKNLSDAILLSDILRVNTEITKAPLSASMIKRYDE
HHQDLTLIKALVRQQLPEKYKEIFFDQSKNGYAGYIDGGASQEEFYKFIKPILEK
MDGTEELLVKLNREDLLRKQRTFDNGSIPHQIHLGELHAILRRQEDFYPFLKDN
REKIEKELTFRIPYYVGPLARGNSRFAWMTRKSEETITPWNFEEVVDKGASAQS
FIERMTNFDKNLPNEKVLPKHSLLYEYFTVYNELTKVKYVTEGMRKPAFLSGEQ
KKAIVDLLFKTNRKVTVKQLKEDYFKKIECFDSVEISGVEDRFNASLGTYHDLLKII
KDKDFLDNEENEDILEDIVLTLTLFEDREMIEERLKTYAHLFDDKVMKQLKRRRY
TGWGRLSRKLINGIRDKQSGKTILDFLKSDGFANRNFNAQUHDDSLTFKEDIQKA
QVSGQGDSLHEHIANLAGSPAIKKGILQTVKVVDELVKVMGRHKPENIVIEMARE
NQTTQKGQKNSRERMKRIEEGIKELGSQILKEHPVENTQLQNEKLYLYYLQNGR
DMYVDQELDINRLSDYDVDHIVPQSFLKDDSIDNKVLTRSDKNRGKSDNVPSEE
VVKKMKNYWRQLLNAKLITQRKFDNLTKAERGGLSELDKAGFIKRQLVETRQIT
KHVAQILDSRMNTKYDENDKLIREVKVITLKSKLVSDFRKDFQFYKVREINNYHH
AHDAYLNAVVGTALIKKYPKLESEFVYGDYKVYDVRKMIAKSEQEIGKATAKYFF
YSNIMNFFKTEITLANGEIRKRPLIETNGETGEIVWDKGRDFATVRKVLSMPQVN
IVKKTEVQTGGFSKESILPKRNSDKLIARKKDWDPKKYGGFDSPTVAYSVLVVA
KVEKGKSKKLKSVKELLGITIMERSSFEKNPIDFLEAKGYKEVKKDLIIKLPKYSLF
ELENGRKRMLASAGELQKGNELALPSKYVNFLYLASHYEKLKGSPEDNEQKQL
FVEQHKHYLDENEQISEFSKRVILADANLDKVLSAYNKHRDKPIREQAENIIHLFT
LTNLGAPAAFKYFDTTIDRKRYTSTKEVLDATLIHQSITGLYETRIDLSQLGGDSG
GSKRTADGSEFEPKKKRKVSGGSSGGSSGSETPGTSESATPESSGGSSGGST
DAEYVRIHEKLDIYTFKKQFFNNKKSVSHRCYVLFELKRRGERRACFWGYAVN
KPOSGTERGIHAEIFSIRKVEEYLRDNPGQFTINWYSSWSPCADCAEKILEWYN
QELRGNGHTLKIWACKLYYEKNARNQIGLWNLRDNGVGLNVMVSEHYQCCRKI
FIQSSHNQLNENRWLEKTLKRAEKWRSELSIMIQVKILHTTKSPAVGSGATNFSL
LKQAGDVEENPGPMVSKGEELFTGVVPILVELDGDVNGHKFSVSGEGEGDATY
GKLTLKFICTTGKLPVPWPTLVTTLTYGVQCFSRYPDHMKQHDFFKSAMPEGY
VQERTIFFKDDGNYKTRAEVKFEGDTLVNRIELKGIDFKEDGNILGHKLEYNYNS
HNVYIMADKOKNGIKVNFKIRHNIEDGSVQLADHYQQNTPIGDGPVLLPDNHYL
STOSALSKDPNEKRDHMVLLEFVTAAGITLGMDELYKSGGSPKKKRKV
pCMV-bpNLS-TadA*(ABE8e)-nCas9-bpNLS-hA3A-UGI-UGI-P2A-EGFP, SEQ
ID NO: 161
MKRTADGSEFESPKKKRKVSEVEFSHEYWIMRHALTLAKRARDEREVPVGAVL
VLNNRVIGEGWNRAIGLHDPTAHAEIMALROGGLVMQNYRLIDATLYVTFEPCV
MCAGAIMIHSRIGRVVFGVRNSKRGAAGSLMNVLNYPGMNHRVEITEGILADEC
AALLCDFYRMPRQVFNAQKKAQSSINSGGSSGGSSGSETPGTSESATPESSG
GSSGGSDKKYSIGLAIGTNSVGWAVITDEYKVPSKKFKVLGNTDRHSIKKNLIGA
LLFDSGETAEATRLKRTARRRYTRRKNRICYLQEIFSNEMAKVDDSFFHRLEES
FLVEEDKKHERHPIFGNIVDEVAYHEKYPTIYHLRKKLVDSTDKADLRLIYLALAH
MIKFRGHFLIEGDLNPDNSDVDKLFIQLVQTYNQLFEENPINASGVDAKAILSARL
SKSRRLENLIAQLPGEKKNGLFGNLIALSLGLTPNFKSNFDLAEDAKLQLSKDTY
DDDLDNLLAQIGDQYADLFLAAKNLSDAILLSDILRVNTEITKAPLSASMIKRYDE
HHQDLTLIKALVRQQLPEKYKEIFFDQSKNGYAGYIDGGASQEEFYKFIKPILEK
MDGTEELLVKLNREDLLRKQRTFDNGSIPHQIHLGELHAILRRQEDFYPFLKDN
REKIEKELTFRIPYYVGPLARGNSRFAWMTRKSEETITPWNFEEVVDKGASAQS
FIERMTNFDKNLPNEKVLPKHSLLYEYFTVYNELTKVKYVTEGMRKPAFLSGEQ
KKAIVDLLFKTNRKVTVKQLKEDYFKKIECFDSVEISGVEDRFNASLGTYHDLLKII
KDKDFLDNEENEDILEDIVLTLTLFEDREMIEERLKTYAHLFDDKVIMKQLKRRRY
TGWGRLSRKLINGERDKQSGKTILDFLKSDGFANRNFMQLIHDDSLTFKEDIQKA
QVSGQGDSLHEHIANLAGSPAIKKGILQTVKVVDELVKVNAGRHKPENEVIEMARE
NOTTQKGQKNSRERMKRIEEGIKELGSQILKEHPVENTQLQNEKLYLYYLQNGR
DMYVDQELDINRLSDYDVDHIVPQSFLKDDSIDNKVLTRSDKNRGKSDNVPSEE
VVKKMKNYWRQLLNAKLITQRKFDNLTKAERGGLSELDKAGFIKRQLVETRQIT
KHVAQILDSRMNTKYDENDKLIREVKVITLKSKLVSDFRKDFQFYKVREINNYHH
AHDAYLNAVVGTALIKKYPKLESEFVYGDYKVYDVRKMIAKSEQEIGKATAKYFF
YSNIMNFFKTEITLANGEIRKRPLIETNGETGEIVWDKGRDFATVRKVLSMPQVN
IVKKTEVQTGGFSKESILPKRNSDKLIARKKDWDPKKYGGFDSPTVAYSVLVVA
KVEKGKSKKLKSVKELLGITIMERSSFEKNPIDFLEAKGYKEVKKDLIIKLPKYSLF
ELENGRKRMLASAGELQKGNELALPSKYVNFLYLASHYEKLKGSPEDNEQKQL
FVEQHKHYLDEHEQISEFSKRVILADANLDKVLSAYNKHRDKPIREQAENIIHLFT
LTNLGAPAAFKYFDTTIDRKRYTSTKEVLDATLIHQSITGLYETRIDLSQLGGDSG
GSKRTADGSEFEPKKKRKVSGGSSGGSSGSETPGTSESATPESSGGSSGGSE
ASPASGPRHLMDPHIFTSNFNNGIGRHKTYLOYEVERLDNGTSVKMDQHRGFL
HNQAKNLLOGFYGRHAELRFLDLVPSLQLDPAQIYRVTWFISWSPCFSWGCAG
EVRAFWENTHVRLRIFAARIYDYDPLYKEALQMLRDAGAQVSIMTYDEFKHDAI
DTFVDHQGCPFQPWDGLDEHSOALSGRLRAILQNQGNSGGSGGSGGSTNLS
DIIEKETGKQLVIQESILMLPEEVEEVIGNKPESDILVHTAYDESTDENVMLLTSD
APEYKPWALVIQDSNGENKIKMLSGGSGGSGGSTNLSDIIEKETGKQLVIQESIL
MLPEEVEEVIGNKPESDILVHTAYDESTDENVMLLTSDAPEYKPWALVIQDSNG
ENKIKMLGSGATNFSLLKQAGDVEENPGPMVSKGEELFTGVVPILVELDGDVN
GHKFSVSGEGEGDATYGKLTLKFICTTGKLPVPWPTLVTTLTYGVQCFSRYPD
HMKQHDFFKSAMPEGYVQERTIFFKDDGNYKTRAEVKFEGDTLVNRIELKGIDF
KEDGNILGHKLEYNYNSHNVYIMADKQKNGIKVNFKIRHNIEDGSVQLADHYQQ
NTPIGDGPVLLPDNHYLSTQSALSKDPNEKRDHMVLLEFVTAAGITLGMDELYK
SGGSPKKKRKV
pCMV-bpNLS-TadA*(ABE8e)-nCas9-bpNLS-hA3A-P2A-EGFP, SEQ ID NO:
162
MKRTADGSEFESPKKKRKVSEVEFSHEYWIMRHALTLAKRARDEREVPVGAVL
VLNNRVIGEGWNRAIGLHDPTAHAEIMALROGGLVMQNYRLIDATLYVTFEPCV
MCAGAIMIHSRIGRVVFGVRNSKRGAAGSLMNVLNYPGMNHRVEITEGILADEC
AALLCDFYRMPRQVFNAQKKAQSSINSGGSSGGSSGSETPGTSESATPESSG
GSSGGSDKKYSIGLAIGTNSVGWAVITDEYKVPSKKFKVLGNTDRHSIKKNLIGA
LLFDSGETAEATRLKRTARRRYTRRKNRICYLQEIFSNEMAKVDDSFFHRLEES
FLVEEDKKHERHPIFGNIVDEVAYHEKYPTIYHLRKKLVDSTDKADLRLIYLALAH
MIKFRGHFLIEGDLNPDNSDVDKLFIQLVQTYNQLFEENPINASGVDAKAILSARL
SKSRRLENLIAOLPGEKKNGLFGNLIALSLGLTPNFKSNFDLAEDAKLQLSKDTY
DODLDNLLAQIGDQYADLFLAAKNLSDAILLSDILRVNTEITKAPLSASMIKRYDE
HHQDLTLLKALVRQQLPEKYKEIFFDQSKNGYAGYIDGGASQEEFYKFIKPILEK
MDGTEELLVKLNREDLLRKQRTFDNGSIPHQIHLGELHAILRRQEDFYPFLKDN
REKIEKILTFRIPYYVGPLARGNSRFAWMTRKSEETITPWNFEEVVDKGASAQS
FIERMTNFDKNLPNEKVLPKHSLLYEYFTVYNELTKVKYVTEGMRKPAFLSGEQ
KKANDLLFKTNRKVTVKQLKEDYFKKIECFDSVEISGVEDRFNASLGTYHDLLKII
KDKDFLDNEENEDILEDIVLTLTLFEDREMIEERLKTYAHLFDDKVIMKQLKRRRY
TGWGRLSRKLINGIRDKQSGKTILDFLKSDGFANRNFMQLIHDDSLTFKEDIQKA
QVSGQGDSLHEHIANLAGSPAIKKGILQTVKVVDELVKVMGRHKPENIVIEMARE
NOTTQKGQKNSRERMKRIEEGIKELGSQILKEHPVENTQLQNEKLYLYYLQNGR
DMYVDQELDINRLSDYDVDHIVPQSFLKDDSIDNKVLTRSDKNRGKSDNVPSEE
VVKKMKNYWRQLLNAKLITQRKFDNLTKAERGGLSELDKAGFIKRQLVETRQIT
KHVAQILDSRMNTKYDENDKLIREVKVITLKSKLVSDFRKDFQFYKVREINNYHH
AHDAYLNAVVGTALIKKYPKLESEFVYGDYKVYDVRKMIAKSEQEIGKATAKYFF
YSNIMNFFKTEITLANGEIRKRPLIETNGETGEIVWDKGRDFATVRKVLSMPQVN
IVKKTEVQTGGFSKESILPKRNSDKLIARKKDWDPKKYGGFDSPTVAYSVLVVA
KVEKGKSKKLKSVKELLGITIMERSSFEKNPIDFLEAKGYKEVKKDLIIKLPKYSLF
ELENGRKRIVILASAGELQKGNELALPSKYVNFLYLASHYEKLKGSPEDNEQKQL
FVEQHKHYLDEIIEQISEFSKRVILADANLDKVLSAYNKHRDKPIREQAENIIHLFT
LTNLGAPAAFKYFDTTIDRKRYTSTKEVLDATLIHQSITGLYETRIDLSQLGGDSG
GSKRTADGSEFEPKKKRKVSGGSSGGSSGSETPGTSESATPESSGGSSGGSE
ASPASGPRHLMDPHIFTSNFNNGIGRHKTYLCYEVERLDNGTSVKMDQHRGFL
HNQAKNLLCGFYGRHAELRFLDLVPSLQLDPAQIYRVTWFISWSPCFSWGCAG
EVRAFLQENTHVRLRIFAARIYDYDPLYKEALQMLRDAGAQVSIMTYDEFKHCW
DTFVDHQGCPFQPWDGLDEHSQALSGRLRAILQNQGNGSGATNFSLLKQAGD
VEENPGPMVSKGEELFTGVVPILVELDGDVNGHKFSVSGEGEGDATYGKLTLK
FICTTGKLPVPWPTLVTTLTYGVQCFSRYPDHMKQHDFFKSAMPEGYVQERTIF
FKDDGNYKTRAEVKFEGDTLVNRIELKGIDFKEDGNILGHKLEYNYNSHNVYIMA
DKQKNGIKVNFKIRHNIEDGSVOLADHYQQNTPIGDGPVLLPDNHYLSTQSALS
KDPNEKRDHMVLLEFVTAAGITLGMDELYKSGGSPKKKRKV
pCMV-bpNLS-hA3A-48AA-TadA*(ABE8e)-nCas9-bpNILS-UGI-UGI-P2A-
EGFP, SEQ ID NO: 163
MKRTADGSEFESPKKKRKVEASPASGPRHLMDPHIFTSNFNNGIGRHKTYLCY
EVERLDNGTSVKIMDQHRGFLHNQAKNLLCGFYGRHAELRFLDLVPSLQLDPA
QIYRVTWFISWSPCFSWGCAGEVRAFLQENTHVRLRIFAARIYDYDPLYKEALQ
MLRDAGAQVSIVITYDEFKHCWDTFVDHQGCPFQPWDGLDEHSQALSGRLRAI
LQNQGNSGSETPGTSESATPESSGGSSGGSSGSETPGTSESATPESSGGSSG
GSSEVEFSHEYWMRHALTLAKRARDEREVPVGAVLVLNNRVIGEGWNRAIGLH
DPTAHAEIMALRQGGLVMQNYRLIDATLYVTFEPCVMCAGAMIHSRIGRVVFGV
RNSKRGAAGSLIMNVLNYPGIMNHRVEITEGILADECAALLCDFYRMPRQVFNAQ
KKAQSSINSGGSSGGSSGSETPGTSESATPESSGGSSGGSDKKYSIGLAIGTN
SVGWAVITDEYKVPSKKFKVLGNTDRHSIKKNLIGALLFDSGETAEATRLKRTAR
RRYTRRKNRICYLQEIFSNEIMAKVDDSFFHRLEESFLVEEDKKHERHPIFGNIVD
EVAYHEKYPTIYHLRKKLVDSTDKADLRLIYLALAHMIKFRGHFLIEGDLNPDNSD
VDKLFIQLVQTYNQLFEENPINASGVDAKAILSARLSKSRRLENLIAQLPGEKKN
GLFGNLIALSLGLTPNFKSNFDLAEDAKLQLSKDTYDDDLDNLLAQIGDQYADLF
LAAKNLSDAILLSDILRVNTEITKAPLSASMIKRYDEHHQDLTLLKALVRQQLPEK
YKEIFFDQSKNGYAGYIDGGASQEEFYKFIKPILEKMDGTEELLVKLNREDLLRK
QRTFDNGSIPHQHLGELHAILRRQEDFYPFLKDNREKIEKILTFRIPYYVGPLAR
GNSRFAWMTRKSEETITPWNFEEVVDKGASAQSFIERMTNFDKNLPNEKVLPK
HSLLYEYFTVYNELTKVKYVTEGMRKPAFLSGEQKKAIVDLLFKTNRKVTVKQL
KEDYFKKIECFDSVEISGVEDRFNASLGTYHDLLKIIKDKDFLDNEENEDILEDIVL
TLTLFEDREMIEERLKTYAHLFDDKVMKQLKRRRYTGWGRLSRKLINGIRDKQS
GKTILDFLKSDGFANRNFMQLIHDDSLTFKEDIQKAQVSGQGDSLHEHIANLAG
SPAIKKGILQTVKVVDELVKVMGRHKPENIVIEMARENQTTQKGQKNSRERMKR
IEEGIKELGSQILKEHPVENTQLQNEKLYLYYLQNGRDMYVDQELDINRLSDYDV
DHIVPQSFLKDDSIDNKVLTRSDKNRCKSDNVPSEEVVKKMKNYWRQLLNAKLI
TQRKFDNLTKAERGGLSELDKAGFIKRQLVETRQITKHVAQILDSRMNTKYDEN
DKLIREVKVITLKSKLVSDFRKDFQFYKVREINNYHHAHDAYLNAVVGTALIKKYP
KLESEFVYGDYKVYDVRKMIAKSEQEIGKATAKYFFYSNIMNFFKTEITLANGEIR
KRPLIETNGETGEIVWDKGRDFATVRKVLSMPQVNIVKKTEVQTGGFSKESILP
KRNSDKLIARKKDWDPKKYGGFDSPTVAYSVLVVAKVEKGKSKKLKSVKELLGI
TIMERSSFEKNPIDFLEAKGYKEVKKDLIIKLPKYSLFELENGRKRMLASAGELQK
GNELALPSKYVNFLYLASHYEKLKGSPEDNEQKQLFVEQHKHYLDEIIEQISEFS
KRVILADANLDKVLSAYNKHRDKPIREQAENIIHLFTLTNLGAPAAFKYFDTTIDR
KRYTSTKEVLDATLIHQSITGLYETRIDLSQLGGDSGGSKRTADGSEFEPKKKRK
VSGGSGGSGGSTNLSDIIEKETGKQLVIQESILMLPEEVEEVIGNKPESDILVHTA
YDESTDENVMLLTSDAPEYKPWALVIQDSNGENKIKMLSGGSGGSGGSTNLSD
IIEKETGKOLVIQESILMLPEEVEEVIGNKPESDILVHTAYDESTDENVMLLTSDAP
EYKPWALVIQDSNGENKIKMLGSGATNFSLLKQAGDVEENPGPMVSKGEELFT
GVVPILVELDGDVNGHKFSVSGEGEGDATYGKLTLKFICTTGKLPVPAIPTLVTT
LTYGVQCFSRYPDHMKQHDFFKSAMPEGYVQERT1FFKDDGNYKTRAEVKFE
GDTLVNRIELKGIDFKEDGNILGHKLEYNYNSHNVYIMADKQKNGIKVNFKIRHNI
EDGSVQLADHYQQNTPIGDGPVLLPDNHYLSTQSALSKDPNEKRDHMVLLEFV
TAAGITLGMDELYKSGGSPKKKRKV
pCMV-bpNLS-hA3A-48AA-TadA*(ABE8e)-nCas9-bpNILS-P2A-EGFP, SEQ ID
NO: 164
MKRTADGSEFESPKKKRKVEASPASGPRHLMDPHIFTSNFNNGIGRHKTYLCY
EVERLDNGTSVKMDQHRGFLHNQAKNLLCGFYGRHAELRFLDLVPSLQLDPA
QIYRVTWFISWSPCFSWGCAGEVRAFLQENTHVRLRIFAARIYDYDPLYKEALQ
MLRDAGAQVSIMTYDEFKHCWDTFVDHQGCPFQPWDGLDEHSQALSGRLRAI
LQNQGNSGSETPGTSESATPESSGGSSGGSSGSETPGTSESATPESSGGSSG
GSSEVEFSHEYWMRHALTLAKRARDEREVPVGAVLVLNNRVIGEGWNRAIGLH
DPTAHAEIMALRQGGLVMQNYRLIDATLYVTFEPCVMCAGAMIHSRIGRVVFGV
RNSKRGAAGSLMNVLNYPGMNHRVEITEGILADECAALLCDFYRMPRQVFNAQ
KKAQSSINSGGSSGGSSGSETPGTSESATPESSGGSSGGSDKKYSIGLAIGTN
SVGWAVITDEYKVPSKKFKULGNTDRHSIKKNLIGALLFDSGETAEATRLKRTAR
RRYTRRKNRICYLQEIFSNEMAKVDDSFFHRLEESFLVEEDKKHERHPIFGNIVD
EVAYHEKYPTIYHLRKKLVDSTDKADLRLIYLALAHMIKFRGHFLIEGDLNPDNSD
VDKLFIQLVQTYNQLFEENPINASGVDAKAILSARLSKSRRLENLIAQLPGEKKN
GLFGNLIALSLGLTPNFKSNFDLAEDAKLQLSKDTYDDDLDNLLAQIGDQYADLF
LAAKNLSDAILLSDILRVNTEETKAPLSASMIKRYDEHHQDLTLLKALVRQQLPEK
YKEIFFDQSKNGYAGYIDGGASQEEFYKFIKPELEKMDGTEELLVKLNREDLLRK
QRTFDNGSIPHQHLGELHAILRRQEDFYPFLKDNREKIEKILTFRIPYYVGPLAR
GNSRFAWMTRKSEETITPWNFEEVVDKGASAQSFIERMTNFDKNLPNEKVLPK
HSLLYEYFTVYNELTKVKYVTEGMRKPAFLSGEQKKANDLLFKTNRKVTVKQL
KEDYFKKEECFDSVEISGVEDRFNASLGTYHDLLKIIKDKDFLDNEENEDILEDEVL
TLTLFEDREMIEERLKTYAHLFDDKVMKQLKRRRYTGWGRLSRKLINGERDKQS
GKTILDFLKSDGFANRNFMLIHDDSLTFKEDEQKAQVSGQGDSLHEHIANLAG
SPAIKKGILQTVKVVDELVKVNAGRHKPENIVIEMARENQTTQKGQKNSRERMKR
IEEGIKELGSQILKEHPVENTQLQNEKLYLYYLQNGRDMYVDQELDINRLSDYDV
DHIVPQSFLKDDSIDNKVLTRSDKNRCKSDNVPSEEVVKKMKNYWRQLLNAKLI
TQRKFDNLTKAERGGLSELDKAGFIKRQLVETRQITKHVAQILDSRMNTKYDEN
DKLIREVKVITLKSKLVSDFRKDFQFYKVREINNYHHAHDAYLNAVVGTALIKKYP
KLESEFVYGDYKVYDVRKIVIIAKSEQEIGKATAKYFFYSNIMNFFKTEITLANGEIR
KRPLIETNGETGEIVWDKGRDFATVRKVLSMPQVNIVKKTEVVGGFSKESILP
KRNSDKLIARKKDWDPKKYGGFDSPTVAYSVLVVAKVEKGKSKKLKSWELLGI
TIMERSSFEKNPIDFLEAKGYKEVKKDLIIKLPKYSLFELENGRKRMLASAGELQK
GNELALPSKYVNFLYLASHYEKLKGSPEDNEQKQLFVEQHKHYLDEHEQISEFS
KRVILADANLDKVLSAYNKHRDKPIREQAENIIHLFTLTNLGAPAAFKYFDTTIDR
KRYTSTKEVLDATLIHQS1TGLYETRIDLSQLGGDSGGSKRTADGSEFEPKKKRK
VGSGATNFSLLKQAGDVEENPGPIVIVSKGEELFTGVVPILVELDGDVNGHKFSV
SGEGEGDATYGKLTLKFICTTGKLPVPWPTLVTTLTYGVQCFSRYPDHMKQHD
FFKSAMPEGYVQERTIFFKDDGNYKTRAEVKFEGDTLVNRIELKGIDFKEDGNIL
GHKLEYNYNSHNVYEMADKQKNGIKVNFKIRHNIEDGSVQLADHYQQNTPIGDG
PVLLPDNHYLSTQSALSKDPNEKRDHMVLLEFVTAAG1TLGMDELYKSGGSPKK
KRKV
pCMV-bpNLS-TadA*(ABE8e)-48AA-hA3A-nCas9-bpNLS-UGI-UGI-P2A-
EGFP, SEQ ID NO: 165
MKRTADGSEFESPKKKRKVSEVEFSHEYWMRHALTLAKRARDEREVPVGAVL
VLNNRVIGEGWNRAIGLHDPTAHAEIMALRQGGLVMQNYRLIDATLYVTFEPCV
MCAGAMIHSRIGRVVFGVRNSKRGAAGSLMNVLNYPGMNHRVEITEGILADEC
AALLCDFYRMPRQVFNAQKKAQSSINSGSETPGTSESATPESSGGSSGGSSG
SETPGTSESATPESSGGSSGGSEASPASGPRHLMDPHIFTSNFNNGIGRHKTY
LCYEVERLDNGTSVKMDCHRGFLHNQAKNLLQGFYGRHAELRFLDLVPSLQLD
PAQIYRVTWFISWSPCFSWGCAGEVRAFLQENTHVRLRIFAARIYDYDPLYKEA
LQMLRDAGAQVSIVITYDEFKHCWDTFVDHQGCPFQPWDGLDEHSQALSGRL
RAELQNQGNSGGSSGGSSGSETPGTSESATPESSGGSSGGSDKKYSIGLAIGT
NSVGWAVITDEYKVPSKKFKVLGNTDRHSIKKNLIGALLFDSGETAEATRLKRTA
RRRYTRRKNRICYLQEIFSNEMAKVDDSFFHRLEESFLVEEDKKHERHPIFGNIV
DEVAYHEKYPTIYHLRKKLVDSTDKADLRLIYLALAHMIKFRGHFLIEGDLNPDNS
DVDKLFIQLVQTYNQLFEENPINASGVDAKNLSARLSKSRRLENLIAQLPGEKK
NGLFGNLIALSLGLTPNFKSNFDLAEDAKLQLSKDTYDDDLDNLLAQIGDQYADL
FLAAKNLSDAILLSDILRVNTEITKAPLSASMIKRYDEHHQDLTLLKALVRQQLPE
KYKEIFFDQSKNGYAGYIDGGASQEEFYKFIKPILEKMDGTEELLVKLNREDLLR
KQRTFDNGSIPHQIHLGELHAILRRQEDFYPFLKDNREKEEKILTFRIPYYVGPLA
RGNSRFAWMTRKSEETITPWNFEEVVDKGASAQSFIERMTNFDKNLPNEKVLP
KHSLLYEYFTVYNELTKVKYVTEGMRKPAFLSGEQKKANDLLSKTNRKVTVKQ
LKEDYFKKIECFDSVEISGVEDRFNASLGTYHDLLKIIKDKDFLDNEENEDELEDIV
LTLTLFEDREMEEERLKTYAHLFDDKVMKQLKRRRYTGWGRLSRKLINGIRDKQ
SGKTILDFLKSDGFANRNFMLIHDDSLTFKEDEQKAQVSGQGDSLHEHIANLA
GSPAIKKGILQTVKVVDELVKVNAGRHKPENIVIEMARENVTQKGQKNSRERMK
RIEEGIKELGSQLKEHPVENTQLONEKLYLYYLQNGRDMWDQELDINRLSDYD
VDHIVPQSFLKDDSEDNKVLTRSDKNRGKSDNVPSEEVVKKMKYWRQLLNAK
LITQRKFDNLTKAERGGLSELDKAGFEKRQLVETRQITKHVAQILDSRMNTKYDE
NDKLIREVKVITLKSKLVSDFRKDFQFYKVREINNYHHAHDAYLNAVVGTALIKKY
PKLESEFVYGDYKVYDVRKMIAKSEQEIGKATAKYFFYSNIMNFFKTEITLANGEI
RKRPLIETNGETGEIVWDKGRDFATVRKVLSMPQVNIVKKTEVQTGGFSKESIL
PKRNSDKLIARKKDWDPKKYGGFDSPTVAYSVLVVAKVEKGKSKKLKSVKELL
GITIMERSSFEKNPIDFLEAKGYKEVKKDLIIKLPKYSLFELENGRKRMLASAGEL
QKGNELALPSKYVNFLYLASHYEKLKGSPEDNEQKQLFVEQHKHYLDEHEQISE
FSKRVILADANLDKVLSAYNKHRDKPIREQAENIIHLFTLTNLGAPAAFKYFDTTID
RKRYTSTKEVLDATLIHQSITGLYETRIDLSQLGGDSGGSKRTADGSEFEPKKK
RKVSGGSGGSGGSTNLSDIEKETGKQLVIQESILMLPEEVEEVIGNKPESDILVH
TAYDESTDENVMLLTSDAPEYKPWALVIQDSNGENKIKVILSGGSGGSGGSTNL
SDIIEKETGKQLVIQESILMLPEEVEEVIGNKPESDILVHTAYDESTDENVMLLTS
DAPEYKPWALVIQDSNGENKIKMLGSGATNFSLIKQAGDVEENPGPMVSKGEE
LFTGVVPILVELDGEWNGHKFSVSGEGEGDATYGKLTLKFICTTGKLPVPWPTL
VTTLTYGVQCFSRYPDHMKQHDFFKSAMPEGYVQERTIFFKDDGNYKTRAEVK
FEGDTLVNRIELKGIDFKEDGNILGHKLEYNYNSHNVYIMADKQKNGIKVNFKIR
HNIEDGSVQLADHYQQNTPIGDGPVLIPDNHYLSTQSALSKOPNEKRDHMVLL
EFVTAAGITIGMDELYKSGGSPKKKRKV
pCMV-bpNLS-TadA*(ABE8e)-48AA-hA3A-nCas9-bpNLS-P2A-EGFP, SEQ ID
NO: 166
MKRTADGSEFESPKKKRKVSEVEFSHEYWMRHALTLAKRARDEREVPVGAVL
VLNNRVIGEGWNRAIGLHDPTAHAEIMALRQGGLVMQNYRLIDATLYVTFEPCV
MCAGAMIHSRIGRVVFGVRNSKRGAAGSLMNVLNYPGMNHRVEITEGILADEC
AALLCDFYRMPRQVFNAQKKAQSSINSGSETPGTSESATPESSGGSSGGSSG
SETPGTSESATPESSGGSSGGSEASPASGPRHLMDPHIFTSNFNNGIGRHKTY
LCYEVERLDNGTSVKMDCHRGFLHNQAKNLICGFYGRHAELRFLDLVPSLQLD
PAQIYRVTWFISWSPCFSWGCAGEVRAFLQENTHVRLRIFAARIYDYDPLYKEA
LQMLRDAGAQVSIMTYDEFKHCWDTFVDHQGCPFQPWDGLDEHSQALSGRL
RAILQNQGNSGGSSGGSSGSETPGTSESATPESSGGSSGGSDKKYSIGLAIGT
NSVGWAVITDEYKVPSKKFKVLGNTDRHSIKKNLIGALLFDSGETAEATRLKRTA
RRRYTRRKNRICYLQEIFSNEMAKVDDSFFHRLEESFLVEEDKKHERHPIFGNIV
DEVAYHEKYPTIYHLRKKLVDSTDKADLRLIYLALAHMIKFRGHFLIEGDLNPQNS
DVDKLFIQLVQTYNQLFEENPINASGVDAKNLSARLSKSRRLENLIAQLPGEKK
NGLFGNLIALSLGLTPNFKSNFDLAEDAKLQLSKDTYDDDLDNLLAQIGDQYADL
FLAAKNLSDAILLSDILRVNTEITKAPLSASMIKRYDEHHQDLTLLKALVRQQLPE
KYKEIFFDQSKNGYAGYIDGGASQEEFYKFIKPILEKMDGTEELLVKLNREDLLR
KQRTFDNGSIPHQIHLGELHAILRRQEDFYPFLKDNREKIEKILTFRIPYYVGPLA
RGNSRFAWMTRKSEETITPWNFEEVVDKGASAQSFIERMTNFDKNLPNEKVLP
KHSLLYEYFTVYNELTKVKYVTEGMRKPAFLSGEQKKANDLLSKTNRKVTVKQ
LKEDYFKKIECFDSVEISGVEDRFNASLGTYHDLLKIIKDKDFLDNEENEDILEDIV
LTLTLFEDREMEEERLKTYAHLFDDKVMKQLKRRRYTGWGRLSRKLINGIRDKQ
SGKTILDFLKSDGFANRNFMLIHDDSLTFKEDEQKAQVSGQGDSLHEHIANLA
GSPAIKKGILQTVKVVDELVKVNAGRHKPENIVIEMARENQTTQKGQKNSRERMK
RIEEGIKELGSQLKEHPVENTQLQNEKLYLYYLQNGRDMYVDQELDINRLSDYD
VDHIVPQSFLKDDSEDNKVLTRSDKNRGKSDNVPSEEVVKMIKNYWRQLLNAK
LITQRKFDNLTKAERGGLSELDKAGFEKRQLVETRQITKHVAQILDSRMNTKYDE
NDKLIREVKVITLKSKLVSDFRKDFQFYKVREINNYHHAHDAYLNAVVGTALIKKY
PKLESEFVYGDYKVYDVRKMIAKSEQEIGKATAKYFFYSNIMNFFKTEITLANGEI
RKRPLIETNGETGEIVWDKGRDFATVRKVLSMPQVNIVKKTEVQTGGFSKESIL
PKRNSDKLIARKKDWDPKKYGGFDSPTVAYSVLVVAKVEKGKSKKLKSVKELL
GITIMERSSFEKNPIDFLEAKGYKEVKKDLIIKLPKYSLFELENGRKRMLASAGEL
QKGNELALPSKYVNFLYLASHYEKLKGSPEDNEQKQLFVEQHKHYLDEHEQISE
FSKRVILADANLDKVLSAYNKHRDKPIREQAENIIHLFTLTNLGAPAAFKYFDTTID
RKRYTSTKEVLDATLIHQSITGLYETRIDLSQLGGDSGGSKRTADGSEFEPKKK
RKVGSGATNFSLIKQAGDVEENPGPMVSKGEELFTGVVPILVELDGDVNGHKF
SVSGEGEGDATYGKLTLKFICTTGKLPVPWPTLVTTLTYGVQCFSRYPDHMKQ
HDFFKSAMPEGYVQERTIFFKDDGNYKTRAEVKFEGDTLVNRIELKGIDFKEDG
NILGHKLEYNYNSHNVYIMADKQKNGIKVNFKIRHNIEDGSVQLADHYQQNTPIG
DGPVLLPDNHYLSTQSALSKDPNEKRDHMVLLEFVTAAGITLGVIDELYKSGGS
PKKKRKV
pCMV-bpNLS-hA3A-32AA-TadA*(ABE8e)-nCas9-bpNLS-UGI-UGI-P2A-
EGFP, SEQ ID NO: 167
MKRTADGSEFESPKKKRKVEASPASGPRHLMDPHIFTSNFNNGIGRHKTYLCY
EVERLDNGTSVKMDQHRGFLHNQAKNLLOGFYGRHAELRFLDLVPSLQLDPA
QIYRVPATISWSPCFSWGCAGEVRAFLQENTHVRLRIFAARIYDYDPLYKEALQ
MLRDAGAQVSIMTYDEFKHOWDTFVDHQGCPFQPWDGLDEHSQALSGRLRAI
LQNQGNSGGSSGGSSGSETPGTSESATPESSGGSSGGSSEVEFSHEYWMRH
ALTLAKRARDEREVPVGAVLVLNNRVIGEGWNRAIGLHOPTAHAEIMALRQGGL
VMQNYRLIDATLYVTFEPCVMCAGAMIHSRIGRVVFGVIRNSKRGAAGSLMNVL
NYPGMNHRVEITEGILADECAALLCDFYRMPRQVFNAQKKAOSSINSGGSSGG
SSGSETPGTSESATPESSGGSSGGSDKKYSIGLAIGTNSVGWAVITDEYKVPSK
KFKVLGNTDRHSIKKNLIGALLFDSGETAEATRLKRTARRRYTRRKNRICYLQEI
FSNEMAKVDDSFFHRLEESFLVEEDKKHERHPIFGNIVDEVAYHEKYPTIYHLRK
KLVDSTDKADLRLIYLALAHMIKFRGHFLIEGDLNPDNSDVDKLFIQLVQTYNQLF
EENPINASGVDAKAILSARLSKSRRLENLIAQLPGEKKNGLFGNLIALSLGLTPNF
KSNFDLAEDAKLQLSKQTYDDDLDNLLAQIGDQYADLFLAAKNLSDAILLSDILRV
NTEITKAPLSASIMIKRYDEHHQDLTLIKALVRQQLPEKYKEIFFDQSKNGYAGYI
DGGASQEEFYKFIKPILEKIMDGTEELLVKLAREDLLRKORTFDNGSPHQIHLGE
LHAILRRQEDFYPFLKDNREKIEKILTFRIPYYVGPLARGNSRFAVVIMTRKSEETIT
PWNFEEVVDKGASAQSFIERMTNFDKNLPNEKVLPKHSLLYEYFTVYNELTKVK
YVTEGMRKPAFLSGEQKKAIVDLLFKTNRKVTVKQLKEDYFKKIECFDSVEISGV
EDRFNASLGTYHDLLKIIKDKDFLDNEENEDILEDIVLTLTLFEDREMIEERLKTYA
HLFDDKVMKQLKRRRYTGWGRLSRKLINGIRDKQSGKTILDFLKSDGFANRNF
MQLIHDDSLTFKEDIQKAQVSGQGDSLHEHIANLAGSPAIKKGILQTVKVVDELV
KVMGRHKPENEVIEMARENQTTQKGQKNSRERMKRIEEGIKELGSQILKEHPVE
NTQLQNEKLYLYYLQNGRDNAYVDQELDENRLSDYDVDHIVPQSFLKDDSIDNKV
LTRSDKNRGKSDNVPSEEVVKKIMKNYWROLLNAKLITQRKFDNLTKAERGGLS
ELDKAGFIKRQLVETRQITKHVAQILDSRMNTKYDENDKLIREVKVITLKSKLVSD
FRKDFQFYKVREENNYHHAHDAYLNAVVGTALIKKYPKLESEFVYGDYKVYDVR
KMIAKSEQEIGKATAKYFFYSNIMNFFKTEITLANGEIRKRPLIETNGETGEIVWD
KGRDFATVRKVLSMPQVNEVKKTEVQTGGFSKESILPKRNSDKLIARKKDWDPK
KYGGFDSPTVAYSVLVVAKVEKGKSKKLKSVKELLGITIMERSSFEKNPIDFLEA
KGYKEVKKDLIIKLPKYSLFELENGRKRNALASAGELQKGNELALPSKYVNFLYLA
SHYEKLKGSPEDNEQKQLFVEQHKHYLDEHEQISEFSKRVILADANLDKVLSAY
NKHRDKPIREQAENIIHLFTLTNLGAPAAFKYFDTTIDRKRYTSTKEVLDATLIHQ
SITGLYETRIDLSQLGGDSGGSKRTADGSEFEPKKKRKVSGGSGGSGGSTNLS
DIIEKETGKQLVIQESILMLPEEVEEVIGNKPESDILVHTAYDESTDENVMLITSD
APEYKPWALVIQDSNGENKIKVILSGGSGGSGGSTNLSDIIEKETGKQLVIQESIL
MLPEEVEEVIGNKPESDILVHTAYDESTDENVIVILLTSDAPEYKPWALVIQDSNG
ENKIKMLGSGATNFSLLKQAGDVEENPGPMVSKGEELFTGVVPILVELDGDVN
GHKFSVSGEGEGDATYGKLTLKFICTTGKLPVPWPTLVTTLTYGVQCFSRYPD
HMKQHDFFKSAMPEGYVQERTIFFKDDGNYKTRAEVKFEGDTLVNRIELKGIDF
KEDGNILGHKLEYNYNSHNVYIMADKQKNGIKVNFKIRHNIEDGSVQLADHYQQ
NTPIGDGPVLLPDNHYLSTQSALSDPNEKRDHMVLLEFVTAAGITLGMDELYK
SGGSPKKKRKV
pCMV-bpNLS-hA3A-32AA-TadA*(ABE8e)-nCas9-bpNLS-P2A-EGFP, SEQ ID
NO: 168
MKRTADGSEFESPKKKRKVEASPASGPRHLMDPHIFTSNFNNGIGRHKTYLCY
EVERLDNGTSVKMDQHRGFLHNQAKNLLOGFYGRHAELRFLDLVPSLQLDPA
QIYRVPATISWSPCFSWGCAGEVRAFLOENTHVRLRIFAARIYDYDPLYKEALQ
MLRDAGAQVSIMTYDEFKHCWDTFVDHQGCPFQPWDGLDEHSQALSGRLRAI
LQNQGNSGGSSGGSSGSETPGTSESATPESSGGSSGGSSEVEFSHEYWMRH
ALTLAKRARDEREVPVGAVLVLNNRVIGEGWNRAIGLHDPTAHAEIMALRQGGL
VMQNYRLIDATLYVTFEPCVMCAGAMIHSRIGRVVFGVRNSKRGAAGSLMNVL
NYPGMNHRVEITEGILADECAALLCDFYRMPRQVFNAQKKAOSSINSGGSSGG
SSGSETPGTSESATPESSGGSSGGSDKKYSIGLAIGTNSVGWAVITDEYKVPSK
KFKVLGNTDRHSIKKNLIGALLFDSGETAEATRLKRTARRRYTRRKNRICYLQEI
FSNEMAKVDDSFFHRLEESFLVEEDKKHERHPIFGNIVDEVAYHEKYPTIYHLRK
KLVDSTDKADLRLIYLALAHMIKFRGHFLIEGDLNPDNSDVDKLFIQLVQTYNOLF
EENPINASGVDAKAILSARLSKSRRLENLIAOLPGEKKNGLFGNLIALSLGLTPNF
KSNFDLAEDAKLQLSKQTYDDDLDNLLAQIGDQYADLFLAAKNLSDAILLSDILRV
NTEITKAPLSASIMIKRYDEHHQDLTLIKALVRQQLPEKYKEIFFDQSKNGYAGYI
DGGASQEEFYKFIKPILEKIMDGTEELLVKLAREDLLRKORTFDNGSPHQIHLGE
LHAILRRQEDFYPFLKDNREKIEKILTFRIPYYVGPLARGNSRFAVVIMTRKSEETIT
PWNFEEVVDKGASAQSFIERMTNFDKNLPNEKVLPKHSLLYEYFTVYNELTKVK
YVTEGMRKPAFLSGEQKKAIVDLLFKTNRKVTVKQLKEDYFKKIECFDSVEISGV
EDRFNASLGTYHDLLKIIKDKDFLDNEENEDILEDIVLTLTLFEDREMIEERLKTYA
HLFDDKVNAKQLKRRRYTGWGRLSRKLINGIRDKQSGKTILDFLKSDGFANRNF
MQLIHDDSLTFKEDIQKAQVSGQGDSLHEHIANLAGSPAIKKGILQTVKVVDELV
KVMGRHKPENEVIEMARENQTTQKGOKNSRERNAKRIEEGIKELGSQILKEHPVE
NTQLQNEKLYLYYLQNGRDMWDQELIDENRLSDYDVDHIVPQSFLKDDSIDNKV
LTRSDKNRGKSDNVPSEEVVKKMKNYWROLLNAKLITQRKFDNLTKAERGGLS
ELDKAGFIKRQLVETRQITKHVAQILDSRMNTKYDENDKVREVKVITLKSKLVSD
FRKDFQFYKVREENNYHHAHDAYLNAVVGTALIKKYPKLESEFWGDYKVYDVR
KMIAKSEQEIGKATAKYFFYSNAINFFKTEITLANGEIRKRPLIETNGETGERAND
KGRDFATVRKVLSMPQVNEVKKTEVQTGGFSKESILPKRNSDKLIARKKDWDPK
KYGGFDSPTVAYSVLVVAKVEKGKSKKLKSVKELLGITIMERSSFEKNPIDFLEA
KGYKEVKKDLIIKLPKYSLFELENGRKRNALASAGELQKGNELALPSKYVNFLYLA
SHYEKLKGSPEDNEQKQLFVEQHKHYLDEHEQISEFSKRVILADANLDKVLSAY
NKHRDKPIREQAENIIHLFTLTNLGAPAAFKYFDTTIDRKRYTSTKEVLDATLIHQ
SITGLYETRIDLSQLGGIDSGGSKRTADGSEFEPKKKRKVGSGATNFSLLKCAG
DVEENPGPMVSKGEELFTGVVPILVELDGDVNGHKFSVSGEGEGDATYGKLTL
KFICTTGKLPVPWPTLVTTLTYGVQCFSRYPDHMKQHDFFKSAMPEGYVQERT
IFFKDDGNYKTRAEVKFEGDTLVNRIELKGIDFKEDGNILGHKLEYNYNSHNVYI
MADKQKNGIKVNFKIRHNIEDGSVQLADHYQQNTPIGDGPVLLPDNHYLSTQSA
LSKDPNEKRDHMVLLEFVTAAGITLGNADELYKSGGSPKKKRKV
miniABEmax-V82G, SEQ ID NO: 223:
MKRTADGSEFESPKKKRKVSEVEFSHEYWMRHALTLAKRARDEREVPVGAVLV
LNNRVIGEGWNRAIGLHDPTAHAEIMALRQGGLVMQNYRLIDATLYGTFEPCV
MCAGAMIHSRIGRWFGVRNAKTGAAGSLMDVIHYPGMNHRVEITEGILADEC
AALLCYFFRMPRQVFNAQKKAQSSTDSGGSSGGSSGSETPGTSESATPESSGGSS
GGSDKKYSIGLAIGTNSVGWAVITDEYKYTSKKFKVLGNTDRHSIKKNLIGALLF
DSGETAEATRLKRTARRRYTRRKNRICYLQEIFSNEMAKVDDSFFHRLEESFLVE
EDKKHERHPIFGNIVDEVAYHEKYPTIYHLRKKLVDSTDKADLRLIYLALAHMIK
FRGHELIEGDLNPDNSDVDKLFIQLVQTYNQLFEENPINASGVDAKAFLSARLSKS
RRLENLIAQLPGEKKNGLFGNLIALSLGLTPNFKSNFDLAEDAKLQLSKDTYDDD
LDNLLAQIGDQYADLFLAAKNLSDAILLSDILRVNTEITKAPLSASMIKRYDEHHQ
DLTLLKALVRQQLPEKYKEIFFDQSKNGYAGYIDGGASQEEFYKFIKPILEKMDG
TEELLVKLNREDLLRKQRTFDNGSIPHQIHLGELHAILRRQEDFYPFLKDNREKIE
KILTFRIPYYVGPLARGNSRFAWMTRKSEETITPWNFEEVVDKGASAQSFIERMT
NFDKNLPNEKVLPKHSLLYEYFTVYNELTKVKYVTEGMRKPAFLSGEQKKAIVD
LLFKTNRKVIVKQLKEDYFKKIECFDSVEISGVEDRFNASLGTYHDLLKIIKDKDF
LDNEENEDILEDIVLTLTLFEDREMIEERLKTYAHLFDDKVMKQLKRRRYTGWG
RLSRKLINGIRDKQSGKTILDFLKSDGFANRNFMQLIHDDSLTFKEDIQKAQVSGQ
GDSLHEHIANLAGSPAIKKGILQTVKVVDELVKVMGRHKPENIVIEMARENQTTQ
KGQKNSRERMKRIEEGIKELGSQILKEHPVENTQLQNEKLYLYYLQNGRDMYVD
QELDINRLSDYDVDHIVPQSFLKDDSIDNKVLTRSDKNRGKSDNVPSEEVVKKM
KNYWRQLLNAKLITQRKFDNLTKAERGGLSELDKAGFIKRQLVETRQITKHVAQ
ILDSRMNTKYDENDKLIREVKVITLKSKLVSDFRKDFQFYKVREINNYHHAHDA
YLNAVVGTALIKKYPKLESEFVYGDYKVYDVRKMIAKSEQEIGKATAKYFFYSN
IMNFFKTEITLANGEIRKRPLIETNGETGEIVWDKGRDFATVRKVLSMPQVNIVKK
TEVQTGGFSKESILPKRNSDKLIARKKDWDPKKYGGFDSPTVAYSVLVVAKVEK
GKSKKLKSVKELLGITIMERSSFEKNPIDFLEAKGYKEVKKDLIIKLPKYSLFELEN
GRKRMLASAGELQKGNELALPSKYVNFLYLASHYEKLKGSPEDNEQKQLFVEQ
HKHYLDEIIEQISEFSKRVILADANLDKVLSAYNKHRDKPIREQAENIIHLFTLTNL
GAPAAFKYFDTTIDRKRYTSTKEVLDATLIHQSITGLYETRIDLSQLGGDSGGSKR
TADGSEFEPKKKRKVGSGATNFSLLKQAGDVEENPGPMVSKGEELFTGWPBLV
ELDGDVNGHKFSVSGEGEGDATYGKLTLTLKFICTTGKLPVPWPTLVTTLTYGVQC
FSRYPDHMKQHDFFKSAMPEGYVQERTIFFKDDGNYKIRAEVKFEGDTLVNRIE
LKGIDFKEDGNILGHKLEYNYNSHNVYIMADKQKNGIKVNFKIRHNIEDGSVQL
ADHYQQNTPIGDGPVLLPDNHYLSTQSALSKDPNEKRDHMVLLEFVTAAGITLG
MDELYKSGGSPKKKRKV
miniABEmax-K20A/R21A, SEQ TO NO: 224:
MKRTADGSEFESPKKKRKVSEVEFSHEYWMRHALTLAAAARDEREVPVGAVLV
LNNRVIGEGWNRAIGLHDPTAHAEIMALRQGGLVMQNYRLIDATLYVTFEPCV
MCAGAMIHSRIGRVVFGVRNAKTGAAGSLMDVLHYPGMNHRVEITEGILADEC
AALLCYFFRMPRQVFNAQKKAQSSTDSGGSSGGSSGSETPGTSESATPESSGGSS
GGSDKKYSIGLAIGTNSVGWAVITDEYKVTSKKFKVLGNTDRHSIKKNLIGALLF
DSGETAEATRLKRTARRRYTRRKNRTCYLQEFFSNEMAKVDDSFFHRLEESFLVE
EDKKHERHPIFGNIVDEVAYHEKYPTIYHLRKKLVDSTDKADLRLIYLALAHMIK
FRGHFLIEGDLNPDNSDVDKLFIQLVQTYNQLFFENPINASGVDAKAILSARLSKS
RRLENLIAQLPGEKKNGLFGNLIALSLGLTPNFKSNFDLAEDAKLQLSKDTYDDD
LDNLLAQIGDQYADLFLAAKNLSDAILLSDTLRVNTEITKAPLSASMIKRYDEHHQ
DLTLLKALVRQQLPEKYKEIFFDQSKNGYAGYIDGGASQEEFYKFIKPILEKMDG
TEELLVKLNREDLLRKQRTFDNGSIPHQIHLGELHAHJRRQEDFYPFLKDNREKIE
KILTFRIPYYVGPLARGNSRFAWMTRKSEETITPWNFEEVVDKGASAQSFIERMT
KFDKNLPNEKVLPKHSLLYEYFTVYNELTKVKYVTEGMRKPAFLSGEQKKAIVD
LLFKTNRKVTVKQLKEDYFKKIECFDSVEISGVEDRFNASLGTYHDLLKIIKDKDF
LDNEENEDILEDIVLTLTLFEDREMIEERLKTYAHLFDDKVMKQLKRRRYTGWG
RLSRKLINGIRDKQSGKTILDFLKSDGFANRNFMQLIHDDSLTFKEDIOKAQVSGQ
GDSLHEHIANLAGSPAIKKGILQTVKVVDELAKVMGRHKPENIVIEMARENQTTQ
KGQKNSRERMKRIEEGIKELGSQILKEHPVENTQLQNEKLYLYYLQNGRDMYVD
QELDINRLSDYDVDHIVPQSFLKDDSIDNKVLTRSDKNRGKSDNVPSEEVVKKM
KNYWRQLLNAKLITQRKFDNLTKAERGGLSELDKAGFIKRQLVETRQITKHVAQ
ILDSRMNTKYDENDKLIREVKVITLKSKLVSDFRKDFQFYKVREINNYHHAHDA
YLNAWGTALIKKYPKLESEFVYGDYKVYDVRKMIAKSEQEIGKATAKYFFYSN
LYLNFFKTE1TLANGEIRKRPLIETNGETGEIVWDKGRDFATVRKVLSMPQVNIVKK
TEVQTGGFSKESILPKRNSDKLIARKKDWDPKKYGGFDSPTVAYSVLVVAKVEK
GKSKKLKSVKELLGITIMERSSFEKNPIDFLEAKGYKEVKKDLIIKLPKYSLFELEN
GRKRMLASAGELQKGNELALPSKYVNFLYLASHYEKLKGSPEDNEQKQLFVEQ
HKHYLDEIIEQISEFSKRVILADANLDKVLSAYNKHRDKPIREQAENIIHLFTLTNL
GAPAAFKYFDTTIDRKRYTSTKEVLDATLIHQSITGLYETRIDLSQLGGDSGGSKR
TADGSEFEPKKKRKVGSGATNFSLLKQAGDVEENPGPMVSKGEELFTGVVPILV
ELDGDVNGHKFSVSGEGEGDATYGKLTLKFICTTGKLPVPWPTLVTTLTYGVQC
FSRYPDMMKQHDFFKSAMPEGYVQERTIFFKDDGNYKTRAEVKFEGDTLVNRIE
LKGIDFKEDGNILGHKLEYNYNSHNVYIMADKQKNGIKVNFKJRHN1EDGSVQL
ADHYQQNTPIGDGPVLLPDNHYLSTQSALSKDPNERDHMVLLEFVTAAGITLG
MDELYKSGGSPKKKRKV
miniABEmax-V106W, SEQ ID NO: 225:
MKRTADGSEFESPKKKRKVSEVEFSHEYWMRHALTLAKRARDEREVPVGAVLV
LNNRVIGEGWNRAIGLHDPTAHAEIMALRQGGLVMQNYRLIDATLYVTFEPCV
MCAGAMIHSRIGRWTGWRNAKTGAAGSLMDVLHYPGMNHRVEITEGILADEC
AALLCYFFRMPRQVFNAQKKAQSSTDSGGSSGGSSGSETPGTSESATPESSGGSS
GGSDKKYSIGLAIGTNSVGWAVITDEYKWSKKFKVLGNTDRHSIKKNLIGALLF
DSGETAEATRLKRTARRRYTRRKNRICYLQEIFSNEMAKVDDSFFHRLEESFLVE
EDKKHERHPIFGNIYDEVAYHEKYPTIYHLRKKLVDSTDKADLRLIYLALAHMIK
FRGHFLIEGDLNPDNSDVDKLFIQLVQTYNQLFEENPINASGVDAKAILSARLSKS
RRLENLIAQLPGEKKNGLFGNLIALSLGLTPNFKSNFDLAEDAKLQLSKDTYDDD
LDNLLAQIGDQYADLFLAAKNLSDAILLSDILRVTMTEITKAPLSASMIKRYDEHHQ
DLTLLKALVRQQLPEKYKEIFFDQSKNGYAGYIDGGASQEEFYKFIKPILEKMDG
TEELLVKLNREDLLRKQRTFDNGSIPHQIHLGELHAILRRQEDFYPFLKDNREKIE
KILTFRIPYYVGPLARGNSRFAWMTRKSEETITPWNFEEVVDKGASAQSFIERMT
NFDKNLPNEKVLPKHSLLYEYFWYNELTKVKYVTEGMRKPAFLSGEQKKAIVD
LLFKTNRKVTVKQLKEDYFKKIECFDSVEISGVEDRFNASLGTYHDLLKIIKDKDF
LDNEENEDDLEDIVLTLTLFEDREMIEERLKTYAHLFDDKVMKQLKRRRYTGWG
RLSRKINGIRDKQSGKTILDFLKSDGFANRNFMQLIHDDSLTFKEDIQKAQVSGQ
GDSLHEHTANLAGSPAIKKGILQWKVVDELVKVMGRITKPENIVIEMARENQTTQ
KGQKNSRERMKRIEEGIKELGSQILKEHPVENTQLQNEKLYLYYLQNGRDMYVD
QELDINRLSDYDVDHIVPQSFLKDDSIDNKVLTRSDKNRGKSDNVPSEEWKKM
KNYWRQLLNAKLITQRKFDNLTKAERGGLSELDKAGFIKRQLVETRQITKHVAQ
ILDSRMNTKYDENDKLIREVKVITLKSKLVSDFRKDFQFYKVREINNYHHAHDA
YLNAVVGTALIKKYPKLESEFVYGDYKVYDVRKMIAKSEOEIGKATAKYFFYSN
IMNFFKTEITLANGEIRKRPLIETNGETGEJVWDKGRDFATVRKVLSMPQVNrVKK
TEVQTGGFSKESILPKRNSDKLIARKKDWDPKKYGGFDSPTVAYSVLVVAKVEK
GKSKKLKSVKELLGITIMERSSFEKNPIDFLEAKGYKEVKKDLIIKLPKYSLFEUEN
GRKRMLASAGELQKGNELALPSKYVNFLYLASHYEKLKGSPEDNEQKQLFVEQ
FrKHYLDEFIEQISEFSKRVILADANLDKVLSAYNKHRDKPIREQAENTIHLFTLTNL
GAPAAFKYFDTTIDRKRYTSTKEVLDATLIHQSITGLYETRIDLSQLGGDSGGSKR
TADGSEFEPKKKRKVGSGATNFSLLKQAGDVEENPGPMVSKGEELFTGVVPILV
ELDGDVNGHKFSVSGEGEGDATYGKLTLKFICTTGKLPVPWPTLVTTLTYGVQC
FSRYPDIIMKQHDFFKSAMPEGYVQERTIFFKDDGNYKTRAEVKFEGDTLVNRIE
LKGIDFKEDGNILGHKLEYNYNSHNVYIMADKQKNGIKVNFKIRHNIEDGSVQL
ADIIYQQNTPIGDGPVLLPDNHYLSTQSALSKDPNEKRDIIMVLLEFVTAAG1TLG
MDELYKSGGSPKKKRKV
TadA* from ABE7.10 and ABEmax (SEQ ID: 226):
SEVEFSHEYWNARHALTLAKRARDEREVPVGAVLVLNNRVIGEGWNRAIGLHDP
TAHAEIMALRQGGLVMQNYRLIDATLYVTFEPCVMCAGAMIHSREGRVVFGVRN
AKTGAAGSLMDVLHYPGMNHRVEITEGILADECAALLCYFFRMPRQVFNAQKK
AQSSTD.
TadA(WT)-TadA* heterodimer from ABE7.10 and ABEmax (SEQ ID: 227):
MSEVEFSHEYWMRHALTLAKRAWDEREVPVGAVLVHNNRVIGEGWNRPIGRH
DPTAHAEIMALRQGGLVMQNYRLIDATLYVTLEPCVMCAGAMIHSRIGRVVFGA
RDAKTGAAGSLMDVLHHPGMNHRVEITEGILADECAALLSDFFRMRRQEIKAQK
KAQSSTDSGGSSGGSSGSETPGTSESATPESSGGSSGGSSEVEFSHEYWMR
HALTLAKRARDEREVPVGAVLVLNNRVIGEGWNRAIGLHDPTAHAEIMALRQGG
LVMQNYRLIDATLYVTFEPCVMCAGAMIHSRIGRVVFGVRNAKTGAAGSLMDVL
HYPGMNHRVEITEGILADECAALLCYFFRMPRQVFNAQKKAQSSTD
ABEmax, SEQ ID NO: 228
MKRTADGSEFESPKKKRKVSEVEFSHEYWMRHALTLAKRAWDEREVPVGAVL
VHNNRVIGEGWNRPIGRHDPTAHAEIMALRQGGLVMQNYRLIDATLYVTLEPCV
MCAGAMIHSRIGRVVFGARDAKTGAAGSLMDVLHHPGMNHRVEITEGILADEC
AALLSDFFRMRRQEIKAQKKAQSSTDSGGSSGGSSGSETPGTSESATPESSG
GSSGGSSEVEFSHEYWMRHALTLAKRARDEREVPVGAVLVLNNRVIGEGWNR
AIGLHDPTAHAEIMALROGGLVMQNYRLIDATLYVTFEPCVMCAGAMIHSRIGR
VVFGVRNAKTGAAGSLMDVLHYPGMNHRVEITEGILADECAALLCYFFRMPRQ
VFNAQKKAQSSTDSGGSSGGSSGSETPGTSESATPESSGGSSGGSDKKYSIG
LAIGTNSVGWAVITDEYKVPSKKFKVLGNTDRHSIKKNLIGALLFDSGETAEATR
LKRTARRRYTRRKNRICYLQEIFSNEMAKVDDSFFHRLEESFLVEEDKKHERHP
IFGNIVDEVAYHEKYPTIYHLRKKLVDSTDKADLRLIYLALAHMIKFRGHFLIEGDL
NPDNSDVDKLFIQLVQTYNQLFEENPINASGVDAKAILSARLSKSRRLENLIAQL
PGEKKNGLFGNLIALSLGLTPNFKSNFDLAEDAKLQLSKDTYDDDLDNLLAQIGD
QYADLFLAAKNLSDAILLSDILRVNTEITKAPLSASMIKRYDEHHQDLTLIKALVR
QQLPEKYKEIFFDQSKNGYAGYIDGGASQEEFYKFIKPILEKMDGTEELLVKLNR
EDLLRKQRTFDNGSIPHQIHLGELHAILRRQEDFYPFLKDNREKIEKILTFRIPYYV
GPLARGNSRFAWMTRKSEETITPWNFEEVVDKGASAQSFIERMTNFDKNLPNE
KVLPKHSLLYEYFTVYNELTKVKYVTEGMRKPAFLSGEQKKNVDLLFKTNRKVT
VKQLKEDYFKKIECFDSVEISGVEDRFNASLGTYHDLLKIIKDKDFLDNEENEDIL
EDIVLTLTLFEDREMIEERLKTYAHLFDDKVMKQLKRRRYTGWGRLSRKLINGIR
DKQSGKTILDFLKSDGFANRNFMQLIHDDSLTFKEDIQKAQVSGQGDSLHEHIA
NLAGSPAIKKGILQTVKVVDELVKVMGRHKPENIVIEMARENQTTQKGQKNSRE
RMKRIEEGIKELGSQILKEHPVENTQLQNEKLYLYYLONGRDMYVDQELDINRL
SDYDVDHIVPQSFLKDDSIDNKVLTRSDKNRGKSDNVPSEEVVKKMKNYWRQL
LNAKLITQRKFDNLTKAERGGLSELDKAGFIKROLVETRQITKHVAQILDSRMNT
KYDENDKLIREVKVITLKSKLVSDFRKDFQFYKVREINNYHHAHDAYLNAVVGTA
LIKKYPKLESEFVYGDYKVYDVRKMIAKSEQEIGKATAKYFFYSNIMNFFKTEITL
ANGEIRKRPLIETNGETGEIVWDKGRDFATVRKVLSMPQVNIVKKTEVQTGGFS
KESILPKRNSDKLIARKKDWDPKKYGGFDSPTVAYSVLVVAKVEKGKSKKLKSV
KELLGITIMERSSFEKNPIDFLEAKGYKEVKKDLIIKLPKYSLFELENGRKRMLAS
AGELQKGNELALPSKYVNFLYLASHYEKLKGSPEDNEQKQLFVEQHKHYLDEII
EQISEFSKRVILADANLDKVLSAYNKHRDKPIREQAENIIHLFTLTNLGAPAAFKY
FDTTIDRKRYTSTKEVLDATLIHQSITGLYETRIDLSQLGGDSGGSKRTADGSEF
EPKKKRKV

### Other Embodiments

[0152] It is to be understood that while the invention has been described in conjunction with the detailed description thereof, the foregoing description is intended to illustrate and not limit the scope of the invention, which is defined by the scope of the appended claims. Other aspects, advantages, and modifications are within the scope of the following claims.

The application's sequence listing, which the Patent Office published only in electronic form, follows.

SEQUENCE LISTING (1109 sequences)

SEQ ID NO: 1 - protein, 223 aa, Loxodonta africana
FRRRIKPWEFEIFFDPRQLRKETCLLYEIKWGTSHKVWRNSGQNTTKHVEVNFIEKFTSERKLCPSISCSITWFLSWSPCWECSKAIREFLRQHPNVTLVIYVARLFHHMDQRNRQGLKDLILSGITVQIMRVSEYHHCWRNFVSYSPGEETYWPRYPPLWMMMYALELHCIILSLPPCLKISRRCQHQLTLFSLTPQKCHYQMIPPYILLATGLIEPPMTWR

SEQ ID NO: 2 - protein, 201 aa, Protopterus annectens
MVQKRTSASKTRMTKKVLLSEYQKFYYSPRTCIGYVIQYDEDNVIFQNWICNKRTTHAELQCIYEIKQNSLIKRFTPCTLKWYMSWTPCSECANEIIRFLNKFCQVKLEICAARIYFHKKKDNRRALRNLVKAGVKLTTMRWKDYKSMWRRFGTGEEIKKYEFFEKSSDHKSVNWRWTLKKILKEKDRDSDLENALSLLKI

SEQ ID NO: 3 - protein, 198 aa, Alligator mississippiensis
MAVEEEKGLLGTSQGWKIELKDFQENYMPSTWPKVTHLLYEIRWGKGSKVWRNWCSNTLTQHAEVNCLENAFGKLQFNPPVPCHITWFLSWSPCCQCCRRILQFLRAHSHITLVIKAAQLFKHMDERNRQGLRDLVQSGVHVQVMDLPDYRYCWRTFVSHPHEGEGDFWPWFFPLWITFYTLELQHILLQQHALSYNL

SEQ ID NO: 4 - protein, 182 aa, Anolis carolinensis
KAAILLSNLFFRWQMEPEAFQRNFDPREFPECTLLLYEIHWDNNTSRNWCTNKPGLHAEENFLQIFNEKIDIKQDTPCSITWFLSWSPCYPCSQAIIKFLEAHPNVSLEIKAARLYMHQIDCNKEGLRNLGRNRVSIMNLPDYRHCWTTFVVPRGANEDYWPQDFLPAITNYSRELDSILQD

SEQ ID NO: 5 - protein, 142 aa, Corvus brachyrhynchos
RWKIEPGDFQINYSPSQHRRGVYLLYEIRWRRGSIWRNWCSNTHRQHAEVNFLENCFKDRPQVPCSITWFLSASPCGKCSKRILEFLKSRPYVTLKIYAAKLFRHHDIRNREGLCNLGMHGVTIHIMNLEDYSYCWRNFVVY

SEQ ID NO: 6 - protein, 142 aa, Calypte anna
RWKIQPNDFKRNYQPGRRPNVVYLLYEIRWRRGTIWRNWCSNEFPQHAEDNFFQNRFNAVPSVSCSITWFLSTTPCGRCSKRILEFLRLHPNVTLKIYAARLFRHLDNRNRQGLRKLASNGVIIQIMGLPDYSYSWKKFVAY

SEQ ID NO: 7 - protein, 237 aa, Tursiops truncatus
MIICWSTGPSAGDATLRRRIEPWEFEVSFDPRELSKETRLLYEIKWGKSQRIWRHSGKNTTKHVERNFIEQITSERRFHRSVSCCIIWFLSWSPCWECSEAIREFLKQHPRVTLLIYVARLFQHMDPRNRQGLRDLTHSGVTIQIMGPTEYDYCWRYFVNYAPGKEAHWPRYPPLLMKLYALELHCIILGLPPCLNISRYQNQLTLFRPILRNCHYQMIPPHILLHTGLIQLPLTWR

SEQ ID NO: 8 - protein, 142 aa, Tyto alba
RWKIQPNDFKRNFLPGQHPKVVYLMYEIRWIRGTAWRSWCSNNSKQDAEVNLLENCFKAMPSVFCSVTWVLFTTPCGKCFRRILEFLRVHSNVALERYAAQLFRHLDICNWQGIRSLAMNGVIIHIMNLADYSYCWKRFVAY

SEQ ID NO: 9 - protein, 244 aa, Pteropus alecto
MWVLFDILISWSTGPSTGDPTLRRRIEPWEFEVFFDPRELRKEACLLYEIQWGTSHKIWRNSGKNTTKHVELNFIEKFTSERHFCSSVSCSIIWFLSWSPCWECSKAIREFLSQRPTVTLVIFVSRLFQHMDQQNRQGLRDLINSGVTIQIMRASEYDHCWRNFVNYPPGKEAHWPRYPPLWMKLYALELHCIILSLPPCVMISRRCQKQLTLFTLILKKCHYQMIPAHILLATGLIQVPVTWR

SEQ ID NO: 10 - protein, 236 aa, Rhinopithecus bieti
MTSEKGPSTGDPTLRRRIEPWEFDIFYDPRELRKEACLLYEIKWGMSWKIWRSSGKNTTNHVEVNFIEKFTSERRFHSSISCSITWFLSWSPCWDCSQAIRKFLSQHPGVTLVIYVARLFWHTDQQNRQGLRDLVNSGVTIQMMTASEYYHCWRNFVNYPPGEEAHWPRYPPLWMMLYALELHCIILSLPPCLKISRRWQNHLTFFRLHLQNCHYQTIPPHILLATGLIQPSVTWR

SEQ ID NO: 11 - protein, 237 aa, Delphinapterus leucas
MIICWSTGPSAGDATSRRRIEPWEFEVSFDPRELCKETRLLYEIKWGKSQHVWRHSDKNTTKHVECKFIEKITSERHFHPSVSCCIIWFLSWSPCWECSKAIREFLNQHPRVTLFIYVARLFQHMDPQNRQGLRDLIHSGVTIHVMGPTEYDYCWRNFVNYPPGKEAHWPRYPPMLMKLYALELHCIILGLPPCLNISRYQNQLTLFRLIPQNCHYRMIPPHILLHRGLIRLPLTWR

SEQ ID NO: 12 - protein, 184 aa, Lonchura striata
MYRRKMRGMYISKRALRKHFDPRNYPRETYLLCELQWRGSHKSWQHWLRNDDSKDCHAEKYFLEEIFEPRSYNICDMTWYLSWSPCGECCDIIQDFLEEQPNVNINIRIARLYYADRASNRRGLMELANSPGVSIEIMDADDYNDCWETFIQPGVYYRFSPENFESAIRRNCSQLEDILQGLHL

SEQ ID NO: 13 - protein, 295 aa, Amazona aestiva
  MOD_RES (27)..(27): Any amino acid
  MOD_RES (87)..(87): Any amino acid
  MOD_RES (182)..(182): Any amino acid
  MOD_RES (201)..(201): Any amino acid
MLPAPAPVPLVLPLQGGGVVVVTVGVXPTALLQPSGAPEVARTFVGAVIAFVIAEYVDTSVSEDTTICGMYIPKEALKYHFDPREVXRDTYLLCILRWGETGTPWSHWVKNYRYHAEVYFLEKIFQTRKSSKNINCSITWYLSWSPCAKCCRKILNFLKKHSYVSIKIHVARLFRIDDKETXQNLKNLGSLVGVTVSVMEXEDYTNCWKTFIRGHADGDSWIDDLKSEIRKNRLKFQGIFKDLPHQTEDVDFWLILAANPGPAWFSFSGYTGWAVASKAPSLLSPLSCLTRLLTP

SEQ ID NO: 14 - protein, 177 aa, Saimiri boliviensis
MTSERRRIEPWEFSISYDPRELCKETCLLYEIKWGMSWKIWRSSGKNTTNHVEVNFIEKFTSERHFHSSVSCSITWFLSWSPCWECSQAIREFLSQHPGVTLVIYVARLFQHMDQQNRQGLRELVNSGVTIQIMTASEYYHCWRNFVNYPPGEEAHWPRHPPLWMMLYALELHCIIL

SEQ ID NO: 15 - protein, 218 aa, Pan paniscus
ISWSTGPSTGDPTLRRRIEPWEFDVFYDPRELRKEACLLYEIKWGMSRKIWRSSERDFHPSISCSITWFLSWSPCWECSQAIREFLSQHPGVTLVIYVARLFWHMDQQNRQGLRDLVNSGVTIQIMTASEYYHCWRNFVNYPPGDEAHWPQYPPLWMMLYALELHCIILSLPPCLKISRRWQNHLTFFSLHLQNCHYQTIPPHILLATGLIHPSVAWR

SEQ ID NO: 16 - protein, 236 aa, Pongo pygmaeus
MTSEKGPSTGDPTLRRRIESWEFDVFYDPRELRKETCLLYEIKWGMSRKIWRSSGKNTTNHVEVNFIKKFTSERRFHSSISCSITWFLSWSPCWECSQAIREFLSQHPGVTLVIYVARLFWHMDQRNRQGLRDLVNSGVTIQIMRASEYYHCWRNFVNYPPGDEAHWPQYPPLWMMLYALELHCIILSLPPCLKISRRWQNHLAFFRLHLQNCHYQTIPPHILLATGLIHPSVTWR

SEQ ID NO: 17 - protein, 236 aa, Bos taurus
MASDRGPPAGDPTLRRRIEPWEFEFSFDPRKFCKEACLLYEIQWGNNRDVWRHSGKNTTKHVERNFIEKIASERYFCPSIRCFIFWYLSWSPCWECSKAIREFLNQHPNVTLVIYIARLFQHMDPQNRQGLKDLVQSGVTIQVMRAPEYEYCWRNFVNYPRGKEAHWPRYPPLWMNLYALELYCIILGLPPCLHISRRYQNQLIVFRLTLQNCHYQMIPPYILLATGMVQLPMTWR

SEQ ID NO: 18 - protein, 107 aa, Myotis brandtii
MDEQNRQGLRDLIKSGVTVQIMTTPEYDYCWRNFVNYPPGKDTHCPMYPPLWMKLYALELHCIILSLPPCLMISRRCQKQLTWYRLNLQNCHYQQIPHHILLATVWI

SEQ ID NO: 19 - protein, 236 aa, Felis catus
MASDKGPSAGDATLRRRIEPREFEVFFDPRELRKEACLLYEIKWGTSHRIWRNSGRNTANHVELNFIEKFTSERHFCPSVSCSITWFLSWSPCWECSKAIRGFLSQHPSVTLVIYVSRLFWHLDQQNRQGLRDLVNSGVTVQIMRVPEYDHCWRNFVNYPPGEEDHWPRYPVVWMKLYALELHCIILSLPPCLKILRRCQNQLTLFRLTLQNCHYQMIPPHILLATGLIQLPVTWR

SEQ ID NO: 20 - protein, 236 aa, Cebus capucinus
MTSERGPSTGDPTLRRRIEPWEFYISYDPKELCKETCLLYEIKWGMSWKIWRSSGKNTTNHVEVNFIEKFTSERRFHSSISCSITWFLSWSPCWECSQAIREFLSQHPGVTLVIYVARLFQHMDQQNRQGLRDLVNSGVTIQIMRASEYYYCWRNFVNYPPGEEAHWPRHPPLWMMLYALELHCIILGLPPCLKISRRRQNRLTFFRLHLQNCHYQMIPPHILLAAGLIQPSVTWR

SEQ ID NO: 21 - protein, 236 aa, Pan troglodytes
MTSEKGPSTGDPTLRRRIEPWEFDVFYDPRELRKEACLLYEIKWGMSRKIWRSSGKNTTNHVEVNFIKKFTSERHFHPSISCSITWFLSWSPCWECSQAIREFLSQHPGVTLVIYVARLFWHMDQQNRQGLRDLVNSGVTIQIMRASEYYHCWRNFVNYPPGDEAHWPQYPPLWMMLYALELHCIILSLPPCLKISRRWQNHLTFFSLHLQNCHYQTIPPHILLATGLIHPSVAWR

SEQ ID NO: 22 - protein, 238 aa, Alligator sinensis
MGEHWQYAGSGEYIPQDQFEENFDPSVLLAETHLLSELTWGGRPYKHWYENTEHCHAEIHFLENFSSKNRSCTITWYLSWSPCAECSARIADFMQENTNVKLNIHVARLYLHDDEHTRQGLRYLMKMKRVTIQVMTIPDYTYCWNTFLEDDGEDESDDYGGYAGVHEDEDESDDDDYLPTHFAPWIMLYSLELSCILQGFAPCLKIIQGNHMSPTFQLHVQDQEQKRLLEPANPWGAD

SEQ ID NO: 23 - protein, 86 aa, Cricetulus griseus
MTEQEYCYCWRNFVNYPPSNEVYWPRYPNVWMRMYALELYCIVLGLPPCLKIIRRHQHPLTFFTLHLQSCHYQRIPPHILWATGLV

SEQ ID NO: 24 - protein, 142 aa, Antrostomus carolinensis
RWKMQPNDFKRNYLPVQYPNMVYLLYEIRWSTGTIWRNWCSNNSTQHAEVNFLENRFNSRPSVSCSITWVLSTTPCGKCSTKILEFLRLHPNVTLKIYAAKLFKHLDIRNRQGLRNLAMNGVIIRIMNLADYSYCWKTFVAY

SEQ ID NO: 25 - protein, 226 aa, Propithecus coquereli
MTSEKRRIEPWEFEAFFDPRELRKEACLLYEIKWGASHKIWRNTGKSTTRHVEVNFIEKFTSERRSDSLISCSITWFLSWSPCWECSKAIREFLSQHPNVTLVIYVARLFWHMNQQNRQGLRDLINSGVTVQIMGVSEYCHCWRNFVNYPPGKEASCPTYPPLWMTLYALELHCIILSLPPCLKISRRCQNQLTFFRLTPQNCHYQTIPPHILLATGLIQPSVTWR

SEQ ID NO: 26 - protein, 231 aa, Macaca fascicularis
GPSTGDPTLRRRIEPWEFDIFYDPRELRKEACLLYEIKWGMSPKIWRSSGKNTTNHVEVNFIEKLTSERRFHSSISCSITWFLSWSPCWECSQAIREFLSQHPGVTLVIYVARLFWHTDQQNRQGLRDLVNSGVTIQIMRASEYYHCWRNFVNYPPGEEAHWPRYPPLWMMLYALELHCIILSLPPCLKISRRWQNHLTFFRLHLQNCHYQMIPPHILLATGLIQPSVTWR

SEQ ID NO: 27 - protein, 142 aa, Nipponia nippon
RWKIQPNDFRSNYLPCQHPRVVYLLYEIRWSRGTIWRNWCSNNSTQHAEVNFLENCFKAMPSVPCSITWVLSTTPCGKCSRRILEFLRVHPNVTLEIYAAKLFKHLDIRNRQGLRNLAKNGVVIRIMKLADYSYWWKRFVAY

SEQ ID NO: 28 - protein, 142 aa, Pelecanus crispus
RWKLQPEDFKRNYLPGQHPKVVYLLYEIRWSRGTIWRSWCSNNSKQHAEVNFLENCFKARPSVSCSITWVLSTTPCGKCSRRILEFLRVHPNVTLEIYAAKLFKHLDIRNQQGLRNLAMNGVIIRIMNLADYSYCWKRFVAH

SEQ ID NO: 29 - protein, 93 aa, Fukomys damarensis
MSDPEFCHCWRNFVNYPPGQEARWPRFPPVWTMLYTLELCCVLLNLPPCLKISRRCHNQLAFFQLNLQNCHYRAIPPAVLFAVGLIHPFVAWA

SEQ ID NO: 30 - protein, 240 aa, Myotis davidii
MASDAGKMDRGPVSFIVLKSVETLCVRRIEPWEFEAIFDPRELRKEACLLYEIKWGTGHKIWRHSGKNTTRHVEVNFIEKITSERQFCSSTSCSIIWFLSWSPCWECSKAITEFLRQRPGVTLVIYVARLYHHMDEQNRQGLRDLVKSGVTVQIMTTPEYDYCWRNFVNYPPGKDTHCPIYPPLLMKLYALELHCIILSLPPCLMISRRCQKQLTWYRLNLQNCHYQQIPHHILLATAWI

SEQ ID NO: 31 - protein, 236 aa, Canis lupus familiaris
MASDKGPSAGDATLRRRIEPWEFEGFFDPRELRKETCLLYEIQWGTSHKTWRNSGKNTTNHVEINFMEKFAAERQYCPSIRCSITWFLSWSPCWECSNAIRGFLSQHPSVTLVIYVARLFWHTDPQNRQGLRDLINSGVTIQIMTVPEYDHCWRNFVNYPPGKEDHWPRYPVLWMKLYALELHCIILNLPPCLKISRRNQHQLTLFRLTLQDCHYQTIPPPILLDMGLIQPLVTWR

SEQ ID NO: 32 - protein, 142 aa, Dryobates pubescens
RWKIHPDEFKLNYVPVGRPRVVYLLYEIRWSRGSIWRNWCSNSSTQHAEVNFLENCFKAMPSVSCSITWFLSTTPCGNCSRRILEFLRAHPKVTLAIHAAKLFKHLDVRNRHGLKALATDGVVLHIMSIADYRYCWTKFVAY

SEQ ID NO: 33 - protein, 236 aa, Mandrillus leucophaeus
MTSEKGPSTGDPTLRRRIEPWEFDIFYDPRELRKEACLLYEIKWGMSPKIWRSSGKNTTNHVEVNFIEKLTSERRFHSSISCSITWFLSWSPCWECSQAIREFLSQHPGVTLVIYVARLFWHTDQQNRQGLRDLVNSGVTIQIMRASEYYHCWRNFVNYPPGEEAHWPRYPPLWMMLYALELHCIILSLPPCLKISRRQQNHLTFFRLHLQNCHYQTIPPHILLATGLIQPSVTWR

SEQ ID NO: 34 - protein, 142 aa, Balearica regulorum
RWKIQPDDFKRNYLPGKHPRVVYLLYEIRWSRGTIWRSWCSNNATQHAEINFLETCFLARTSVSCSITWVLSTTPCGKCSRRILEFLNAYPNVTLEIYAAKLFRHLDNRNRQGLRNLAMKGVRIHIMNLADYSYFWKIFVAY

SEQ ID NO: 35 - protein, 142 aa, Aptenodytes forsteri
RWKIRPNDFKRNYLPGQHPKVVYLLYEIRWSRGTIWRNWCSNNSTQHAEVNFLENCFKAMPSVSCSITWVLSTTPCGKCSRRILEFLRVHPNVTLEIYAAKLFKHLDIRNRQGLRNLAMNGVIIRIMNLADYSYGWKRFVAY

SEQ ID NO: 36 - protein, 236 aa, Enhydra lutris
MASDKGPSAGDATLRRRIEPWEFEVFFDPRELRKEACLLYEIQWGTSHKMWRNTGKNTANHVELNFIEKFTSERRYCPSTHCSITWFLSWSPCWECCKAIRGFLSQHPSVTLVIYVTRLFWHMDPQNRQGLRDLLKSGVTVQIMRAPEYDHCWKNFVNYPPGKEDHWPRYPELWMKLYELELYCIILSLPPCLKISRRNQNQLTLFRLTLQNCHYQIIPPHILLDTGLIQLPVIWR

SEQ ID NO: 37 - protein, 236 aa, Mustela putorius
MASDKGPSAGDATLRRRIEPWEFEVFFDPRELRKEACLLYEIQWGTSHKMWRNTGKNTANHVELNFIEKFTSERRYCPSTHCSITWFLSWSPCWECSKAIRGFLSQCPSVTLVIYVTRLFWHMDPQNRQGLRDLLKSGVTVRIMRAPEYDHCWKNFVNYPPGKEDHWPRYPELWMKLYELELYCIILSLPPCLKISRRNQKQLTLFRLTLQNCHYQIIPPHILLDTGLIQLPVIWR

SEQ ID NO: 38 - protein, 248 aa, Trichechus manatus
MTSEEADQRHSTMTSEKGPSTGDGTLRRRITPWEFEIFFDPRELRKETCLLYEIKWGTSHRIWRNSGQNTTKHAEVNFIEKFTSERNFCPSVSCSITWFLSWSPCWECSKAIREFLSQHPNVILVIYVARLFHHMDQQNREGLRDLVLSGVTVQIMSVSEYGHCWRNFVNYPPGEEARWPRYPPLWMMLYALELHCIILGLPPCLKISRRRQSQLTLFSLTPQNCHYQMIPPHILLATGLIQPYVTWR

SEQ ID NO: 39 - protein, 235 aa, Ailuropoda melanoleuca
ISWSTGPSGGDATSRRRIEPWEFEVFFDPRQLRKEACLLYEIQWGTSRKIWRNSGKNTTNHVEINFIEKFTLERQYCPSIHCSVTWFLSWSPCWECSKAIRAFLSQHPSVTLVIYVARLFWHMEPQNRQGLRDLINSGVTIQIMSVPEYDHCWRNFVNYPPGKDHWPGYPVLWMKLYALELHCIILSLPPCLKISRRNQNQLTLFRLTLQNCHYQTIPPHVLLATGLIQLPVTWR

SEQ ID NO: 40 - protein, 142 aa, Manacus vitellinus
RWKIQPKDFKRNYLPGQHPQVVYLLYEIRWRNGSIWRNWFSNNRNQHAEVNFLENCFSDVPPAPCSITWFLSTSPCGKCSRRILEFLRTHRNVTLEIYAAKLFRHQDIRNRQGLCNLVMNGVTIHIMNLADYSYCWKRFVAY

SEQ ID NO: 41 - protein, 229 aa, Mesocricetus auratus
MSSETGPVVVDPTLRRRIEPHEFDAFFDQGELRKETCLLYEIRWGGRHNIWRHTGQNTSRHVEINFIEKFTSERYFYPSTRCSIVWFLSWSPCGECSKAITEFLSGHPNVTLFIYAARLYHHTDQRNRQGLRDLISRGVTIRIMTEQEYCYCWRNFVNYPPSNEVYWPRYPNLWMRLYALELYCIHLGLPPCLKIKRRHQYPLTFFRLNLQSCHYQRIPPHILWATGFI

SEQ ID NO: 42 - protein, 191 aa, Rhinopithecus roxellana
MSWKIWRSSGKNTTNHVEVNFIEKFTSERRFHSSISCSITWFLSWSPCWDCSQAIRKFLSQHPGVTLVIYVARLFWHTDQQNRQGLRDLVNSGVTIQMMTASEYYHCWRNFVNYPPGEEAHWPRYPPLWMMLYALELHCIILSLPPCLKISRRWQNHLTFFRLRLQNCHYQTIPPHILLATGLIQPSVTWR

SEQ ID NO: 43 - protein, 191 aa, Chlorocebus sabaeus
MSRKIWRSSGKNTTNHVEVNFIEKLTSERRFHSSVSCSVTWFLSWSPCWECSQAIREFLSQHPGVTLVIYVARLFWHTDQQNRQGLRDLVNSGVTIQIMRASEYYHCWRNFVNYPPGEEAHWPRYPPLWMMLYALELHCIILSLPPCLKISRRWQNHLTFFRLHLQNCHYQTIPPHILLATGLIQPPVTWR

SEQ ID NO: 44 - protein, 236 aa, Cavia porcellus
MASGTGPSTGDATLRRRIEPWQFEAYFDPRQLRKEACMLSEVRWGASPRTWRESSLNTTSHVEINFIEKFTSGRSLRPAVRCSMTWFLSWSPCWECARAIREFLHQHPNVSLVIYVARLYWHVDEQNRQGLRDLVTSGVRVQIMSDSEYRHCWRNFVNFPPGQEAGWPRFPPMWTTLYALELSCILLSLPPCLKISRRRQYRLIVFQLILQTCHYRAIPPQVLSAAELMHPLVAWC

SEQ ID NO: 45 - protein, 235 aa, Neomonachus schauinslandi
MASDKGPSAGDATLRRRIKPWEFEVFFDPRELRKETCLLYEIQWGTSHKIWRNSGKNTANHVEINFIEKFTSERQYCPSIRCSITWFLSWSPCWECSKAIRGFLSQHPSVTLVIYVARLFWHMDPQNRQGLRDLINSGVTIQIMRVPEYDHCWRNFVNYLPGKEDHWPRYPVLWMKLYALELHCIILSLPPCLRISRRQNQLTLFTLTLQNCHYQMIPPHILLATGLIQVPVTWK

SEQ ID NO: 46 - protein, 142 aa, Opisthocomus hoazin
RWKVQPNDFKRNYLPGQHPKVVYILYEIRWSRGTIWRNWCTNNSTQHAEVNFLENCFKAMPSVSCSITWVLSTTPCGKCSKRIQDFLRIYPNVTLEIHAAKLFKHLDTRNREGLRNLAKDGVIIHIMNLADYSYWWKRFVAY

SEQ ID NO: 47 - protein, 191 aa, Equus caballus
MSHNIWRYSGKNTTKHVEINFIEKFTSERHLRPSISCSIVWFLSWSPCWECSKAIREFLSQHPNVTLVIYVARLFQHMDRLNRQGLRDLINSGVTIQIMRTSEYDHCWRNFVNYPPGKEAHWPRYPLLWMKLYALELHCIILSLPPCLMISRRCQNQLTFFRLTLQNCHYQMIPPHILLATGLVQLPVTWR

SEQ ID NO: 48 - protein, 236 aa, Homo sapiens
MTSEKGPSTGDPTLRRRIEPWEFDVFYDPRELRKEACLLYEIKWGMSRKIWRSSGKNTTNHVEVNFIKKFTSERDFHPSMSCSITWFLSWSPCWECSQAIREFLSRHPGVTLVIYVARLFWHMDQQNRQGLRDLVNSGVTIQIMRASEYYHCWRNFVNYPPGDEAHWPQYPPLWMMLYALELHCIILSLPPCLKISRRWQNHLTFFRLHLQNCHYQTIPPHILLATGLIHPSVAWR

SEQ ID NO: 49 - protein, 142 aa, Nestor notabilis
RWKIQPNDFKRNYLPYQHPKVVCLLYEIRWNRGTIWRSWCSNNSTQHAEVNFLENCFKAKPSVSCSITWVLSTTPCGECSRRILDFLSVYPNVTLKIYAAKLFKHLDNRNRQGLWNLANNRVIIRIMNLEDYNYYWKRFVAY

SEQ ID NO: 50 - protein, 142 aa, Egretta garzetta
RWKIQPNDFKRNYLPGQHPKVVYLLYEIRWSRGTIWRNWCSNNSTQHAEVNFLENCFKAMPSVSCSITWVLSTTPCGKCSRRILEFLRVHPSVTLEIYAAKLFKHLDIRNRQGLRNLAMNGVIIHIMNLADYSYWWKIFVAY

SEQ ID NO: 51 - protein, 248 aa, Aotus nancymaae
MTPEEEVQRQSTMTSERGPSTGDPTLRRRIEPWEFCISYDPKELCKETCLLYEIKWGTSWKIWRSSGKNTTNHVEVNFIEKFMSERHFHSSISCSITWFLSWSPCWECSQAIREFLSRHPGVTLVIYVARLFQHMDRQNRQGLRDLVNSGVTIQIMRASEYYHCWRNFVNYPPGEEAHWPRYPPLWMMLYALELHCIILGLPPCLKISRRWQNRLTFFRLHLQNCHYQMIPQHILFATGLIQPPVTWR

SEQ ID NO: 52 - protein, 229 aa, Mus musculus
MSSETGPVAVDPTLRRRIEPHEFEVFFDPRELRKETCLLYEINWGGRHSVWRHTSQNTSNHVEVNFLEKFTTERYFRPNTRCSITWFLSWSPCGECSRAITEFLSRHPYVTLFIYIARLYHHTDQRNRQGLRDLISSGVTIQIMTEQEYCYCWRNFVNYPPSNEAYWPRYPHLWVKLYVLELYCIILGLPPCLKILRRKQPQLTFFTITLQTCHYQRIPPHLLWATGLK

SEQ ID NO: 53 - protein, 221 aa, Heterocephalus glaber
RRRIEPWQFEASFDPRQLRRETCLLSEVRWGTSPRAWRGCSLNTARHAEVSFMDRLTSEGRLRGPVRCSITWFLSWSPCGACAQAIGEFLRQHPNVSLVIYIARLFWHVDEQNRQGLRDLVTRGVRMQVMSDPEFAHCWRNFVNYSPGQEARWPQVPPVWTWLYSLELHCILLNLPPCLKISRRHHNQLTFFQLILQNCHYQAIPSPVLLASGLIHPFVTW

SEQ ID NO: 54 - protein, 142 aa, Merops nubicus
RWKIEPDEFKTNYSPDHRPRVVYLLYEIRWRRGTIWRNWCSNNIDQHAEVNFLENCFKAKPSVSCSITWFLSTAPCAKCSRRILKFLTAHPKVTLEIYAAKLFRHLEIRNRQGLMDLAVNGVILRIMNLADYSYCWKQFVAY

SEQ ID NO: 55 - protein, 142 aa, Fulmarus glacialis
RWKIQPNDFKRNFLPSKYPKVVYLLYEIRWSSGTIWRSWCSNNSTQHAEVNFLENCFKAMPSVSCSITWVLPITPCGKCSKKILEFLSVHPNVTLEIYAAKLFRHLDIRNQQGLRNLAMNGVIIRIMNLADYSYSWKRFVAY

SEQ ID NO: 56 - protein, 236 aa, Nomascus leucogenys
MTSEKGPSTGDPTLRRRIEPWEFDVFYDPRELRKEACLLYEIKWGMSQKIWRSSGKNTTNHVEVNFIKKFTSEGRFQSSISCSITWFLSWSPCWECSQAIREFLSQHPGVTLVIYVARLFWHMDQQNRQGLRDLVNSGVTIQIMRASEYYHCWRNFVNYPPGDEAHWPRYPPLWMMLYALELHCIILSLPPCLKISRRWQNHLTFFRLHLQNCHYQTIPPHILLATGLIHPSVTWR

SEQ ID NO: 57 - protein, 236 aa, Papio anubis
MTSEKGPSTGDPTLRRRIEPWEFDIFYDPRELRKEACLLYEIKWGMSPKIWRSSGKNTTNHVEVNFIEKLTSERRFHSSISCSITWFLSWSPCWECSQAIREFLSQHPGVTLVIYVARLFWHTDQQNRQGLRDLVNSGVTIQIMTASEYYHCWRNFVNYPPGEEAHWPRYPPLWMMLYALELHCIILSLPPCLKISRRWQNHLTFFRLHLQNCHYQTIPPHILLATGLIQPSVTWR

SEQ ID NO: 58 - protein, 235 aa, Monodelphis domestica
MNSKTGPSVGDATLRRRIKPWEFVAFFNPQELRKETCLLYEIKWGNQNIWRHSNQNTSQHAEINFMEKFTAERHFNSSVRCSITWFLSWSPCWECSKAIRKFLDHYPNVTLAIFISRLYWHMDQQHRQGLKELVHSGVTIQIMSYSEYHYCWRNFVDYPQGEEDYWPKYPYLWIMLYVLELHCIILGLPPCLKISGSHSNQLALFSLDLQDCHYQKIPYNVLVATGLVQPFVTWR

SEQ ID NO: 59 - protein, 262 aa, Dipodomys ordii
MHHSARLPPNCIVSRYANAPWTVLPLPLPPTEAPATGDDTLRRRIEPWEFEAFFNPQELRREACLLYQITWSSHKVWRETAKNTVDSHVEVNFIQNLTAGRYCRPSTRCSILWFLSWSPCSSCSKAIRLFLSQHPGVSLVIYVARLFQHMDPQNRQGLRELIHSGVTIQVMRPQEYDYCWKNFVNYPPGQEEHWPRYPVQCMTLYNLELYCIIHNLPPCVRISKQRQSQLAFFSLGLENVHYQRIPPPLLLLTGLVFVFPWK

SEQ ID NO: 60 - protein, 235 aa, Odobenus rosmarus
MASDKGPSAGDATLRRRIEPWEFEVFFDPRELRKEACLLYEIQWGTSHKIWRNSGKNTSNHVEINFIEKFTSERQYCPSIHCSITWFLSWSPCWECSEAIRGFLSQHPSVTLVIYVARLFWHMDPQNRQGLRDLINSGVTIQIMRVPEYDHCWRNFVNYPPGKEDHWPRYPVLWMKLYALELHCIILSLPPCLRISRRQNQLTLFRLTLQNCHYQMIPPHILLATGLIQVPVTWK

SEQ ID NO: 61 - protein, 330 aa, Patagioenas fasciata
MRRKKPSGMYISKRALKDNFDPHKFPHDTYLLCKLQWGDTGRSWIHWIRKDRYHAEVYFLEKIFKMRRSKNYVNCSITWYLSWSPCVRCCCEILNFLEKHSYVNIDIYVARLYKIQNSEVREGLKKLVSSKKVTIAVMEIKDYTYCWKNFIQGDADDDSWTVDFQSAITKNRLKLKDVFEFLKSHPNVTLEIYAAKLFKHLDIRNREGLRNLAKNGVIIHIMNLADYSYWWKIFVTRQHGEDDYLPWSFALHIFLNCIEFQQILLVSRHLKESLRVKSNEKAQEKEVWRIPAMVLAEMIVGKMNRDLMLHEQRANRARNCKGLWCYIVPL

SEQ ID NO: 62 - protein, 230 aa, Colobus angolensis
PSTGDPTLRRRIEPWEFDIFYDPRELRKEACLLYEIKWGMSQKIWRSSGKNTTNHVEVNFIEKLTSERRFHSSVSCSITWFLSWSPCWECSQAIREFLSQHPGVTLVIYVARLFWHTDQQNRQGLRDLVNSGVTIQMMTASEYYHCWRNFVNYPPGEEAHWPRYPPLWMMLYALELHCIILSLPPCLKISRRWQNHLTFFRLHLQNCHYQTIPPHILLATGLIQPSVTWR

SEQ ID NO: 63 - protein, 198 aa, Tarsius syrichta
  MOD_RES (38)..(38): Any amino acid
MLTALMEEVQDTMRFGRRAFFLSNSVGIWVLFDISISXSTGPSMGDPTLRRRIEPWEFEVLFDPRELRKEACLLYEIKWGTSCKIWRNSGKNTSNHAEVNFLEKFTSERHFCSSTSYSITWFLSWSPCWECSRAIREFLSQHPRVTLVIYVARLFWHMEPQNRQGLRDLINSGVTIQIMRDSGKSNKQIIRIVCERTW

SEQ ID NO: 64 - protein, 236 aa, Sus scrofa
MASDRGPSAGDATSRRRIEPWEFEVFFDPRELRKETCLLYELQWGRSRDTWRHTGKNTTNHVERNFLAKITSERHFHPSVHCSIVWFLSWSPCWECSEAIREFLDQHPSVTLVIYVARLFQHMDPQNRQGLRDLVNHGVTIQIMGAPEYDYCWRNFVNYPPGKEAHWPRFPPVWMTLYALELHCIILGLPPCLKISRRCQNQLTFFRLTLQNCHYQTIPPHILLATGLIQLPVIYR

SEQ ID NO: 65 - protein, 236 aa, Macaca nemestrina
MTSEKGPSTGDPTLRRRIEPWEFDIFYDPRELRKEACLLYEIKWGMSPKIWRSSGKNTTNHVEVNFIEKLTSERRFHSSISCSITWFLSWSPCWECSQAIREFLSQHPGVTLVIYVARLFWHTDQQNRQGLRDLVNSGVTIQIMRASEYYHCWRNFVNYLPGEEAHWPRYPPLWMMLYALELHCIILSLPPCLKISRRWQNHLTFFRLHLQNCHYQMIPPHILLATGLIQPSVTWR

SEQ ID NO: 66 - protein, 236 aa, Oryctolagus cuniculus
MASEKGPSNKDYTLRRRIEPWEFEVFFDPQELRKEACLLYEIKWGASSKTWRSSGKNTTNHVEVNFLEKLTSEGRLGPSTCCSITWFLSWSPCWECSMAIREFLSQHPGVTLIIFVARLFQHMDRRNRQGLKDLVTSGVTVRVMSVSEYCYCWENFVNYPPGKAAQWPRYPPRWMLMYALELYCIILGLPPCLKISRRHQKQLTFFSLTPQYCHYKMIPPYILLATGLLQPSVPWR

SEQ ID NO: 67 - protein, 229 aa, Rattus norvegicus [sequence omitted]

SEQ ID NO: 68 - protein, 142 aa, Cariama cristata
RWKIQPDDFKRNYLPGQHPEVVYLLYEIKWNSGTIWRNWCSNNPTQHAEVNFLENHFNVMSSVSCSITWGISTTPCGKCSRRILEFLTTHPNVTLEIYAAKLFKHLDIRNRQGLRNLAMNGVVICIMNLADYSYFWKTFVAY

SEQ ID NO: 69 - protein, 142 aa, Gavia stellata
RWKIQPNDFKRNYLPAQHPKVVYLLYEIRWSRGTIWRNWCSNNSTQHAEVNFLENCFKAMPSVSCSITWFLSTTPCGKCSRRILTFLREHPNVTLEIYAAKLFKHLDVRNQQGLRNLDRNGVIIRIMNFADYSYCWKRFVAY

SEQ ID NO: 70 - protein, 231 aa, Macaca mulatta; identical to SEQ ID NO: 26

SEQ ID NO: 71 - protein, 142 aa, Acanthisitta chloris
RWKIQPNDFQRNYLPDQHPQAVYLLYEFRWRRGSIWRKWCSNNRAQHAEVNFLENCFNGIPPVPCSITWFLSTTPCGNCSRRILEFLRLHPNVTLEIYAAKLFRHTDIRNRKGLYNLAMNGVIIRIMNLADYSYCWRNFVAY

SEQ ID NO: 72 - protein, 197 aa, Columba livia
MAAVTNRDSACRENNQRWKIQPNDFRRNYLPDKQPRVVYLLYEIRWRRGTIWRNWCSNNPNQHAEVNFLKNYFNAMPSVSCSITWVLSTTPCGKCSIKIMEFLKLHPNVTLEIYAAKLFKHLDIRNREGLRNLAKNGVIIHIMNLADYSYWWKIFVTRQHGEEDYLPWSFALHIFLNCIEFQQILLGLPPLLPNFKY

SEQ ID NO: 73 - protein, 239 aa, Ovis aries
MASDRGPPAGDPTLRRRIEPLEFEFSFDPRNFCKEAYLLYEIQWGNSRDVWRHSGKNTTKHVERNFIEKIASERHFRPSISCSISWYLSWSPCWECSKAIREFLNQHPNVTLVIYIARLFQHMDPQNRQGLKDLFHSGVTIQVMRDPEYDYCWRNFVNYPQGKEAHWPRYPPLWMNLYALELYCIISGLPPCLQISRRHQNQLRVFRLIPQNCHYQMIPPCILLATGMIQLPVTWRWIE

SEQ ID NO: 74 - protein, 236 aa, Otolemur garnettii
ISWSTGISTGDPTLRRRIEPWEFEVFFDPRELRKETCLLYEIKWGTSHKIWRSTARNTTSHAEMNFIEKFTSERCSDAPISCSITWFLSWSPCWECSKAIREFVSRHPSVTLVIYVARLYWHMDQQNRQGLRDLISSGVTVQIMRVSEYCHCWRNFVNYLPGKEAHCPRCPPLWMTLYALELHCIILSLPPCLKISRGHQNQLTLFRLTLQNCHYQTIPPHVLLATGLIQPYVTWR

SEQ ID NO: 75 - protein, 205 aa, Stylophora pistillata
MASVTELRTPDDFLAELLWTGVTGRTWPNRTFLIVSIKAKDGKPIFGKRFKNRYPEHAEIIMLRNSNFSDVVEKNHDIDITLTLNYSPCSSCACILKEFYVNNSNIKCFTIQFSFIYYKEDMKNKTGLQNLEEAGVTLQAMNAESWREVGIDLESFTPEDKEKINKRDKDTANDLNEVLSSKQDQDASVDELSSQLNAKLRAKET

SEQ ID NO: 76 - protein, 248 aa, Cercocebus atys
MTPEEEVQRQSTMTSEKGPSTGDPTLRRRIEPWEFDIFYDPRELRKEACLLYEIKWGMSPKIWRSSGKNTTNHVEVNFIEKLTSERRFHSSISCSITWFLSWSPCWECSQAIREFLSQHPGVTLVIYVARLFWHTDQQNRQGLRDLVNSGVTIQIMRASEYYHCWRNFVNYPPGEEAHWPRYPPLWMMLYALELHCIILSLPPCLKISRRQQNHLTFFRLHLQNCHYQTIPPHILLATGLIQPSVTWR

SEQ ID NO: 77 - protein, 238 aa, Physeter macrocephalus
MIICWSTGPSAGDATSRRRIEPWEFEVSFDPREFCKEARLLYEIKWGKSQDVWRHSGKNTTKHVECNFIEKMTSERHFHPSISCCIIWFLSWSPCWECSKAIREFLNQHPSVTLVIYIARLFQHTDPQNRQGLRDLIHSGVTLQIMGPPEYDYCWRNFVNYPPGKEAHWPRYPPLWMKLYALELHCIILGLPPCLKISRRCQNQLTWFRLILQNCHYQMIPPHILLGTGLIQLPVAWR

SEQ ID NO: 78 - protein, 248 aa, Pongo abelii
MTPEEEVQRQSTMTSEKGPSTGDPTLRRRIESWEFDVFYDPRELRKETCLLYEIKWGMSRKIWRSSGKNTTNHVEVNFIKKFTSERRFHSSISCSITWFLSWSPCWECSQAIREFLSQHPGVTLVIYVARLFWHMDQRNRQGLRDLVNSGVTIQIMRASEYYHCWRNFVNYPPGDEAHWPQYPPLWMMLYALELHCIILSLPPCLKISRRWQNHLAFFRLHLQNCHYQTIPPHILLATGLIHPSVTWK

SEQ ID NO: 79 - protein, 142 aa, Eurypyga helias
RWKIQPNDFKRNYMPSQYPKVVYLLYEIRWSRGTVWRNWCSNSFTQHAEVNFLENYFKPMPSVSCSITWVLSTTPCGKCSRRILEFLRVHPNVTLEIYAAKLFKHLDIRNRQGLRDLAMNGVTIRIMNLADYSFCWKRFVAY

SEQ ID NO: 80 - protein, 228 aa, Sarcophilus harrisii
MGDATLRRRIKSWEFEAFFNPQELRKETCLLYEIKWGASHNIWRSSNQNTTQHAEINFMEKFTSERNFKPSVKCSITWFLSWSPCWRCSKAIREFLNQYPNVTLVIFVSRLYWHMEQQHRQELKELVCSGVTIQIMNYSEYRHCWRNFVDYLPEEEDHWPKYPTLWIMLYVLELHCIILGLPPCLKISVRHSDQLVLFSLDLQDCHYQKIPYHVLVATGIIRPFVTWR

SEQ ID NO: 81 - protein, 338 aa, Leptonychotes weddellii
MASDKGPSAGDATLRRRIKPWEFEVFFDPRELRKETCLLYEIQWGTSHKIWRNSGKNTANHVEINFIEKFTSERQYCPSIRCSITWFLSWSPCWECSKAIRGFLSQHPSVTLVIYVARLFWHMDPQNRQGLRDLINSGVTIQIMRVPEYDHCWRNFVNYLPGKEDHWPRYPVLWMKLYALELHCIILPIEMPGKIRDAPNNMEIFSLFVGRYIPKTKFHVTCLLSDVRNDDSHLDKTAPKWIRFDSLQPVASDPSAEHWKMKLPGRDDKTAVVVGTVTEDVACAQGAKLYLCALRVHGHAQRHFLKGRDEILALDQLALDSPQGLWRQPDLRSHPLKG

SEQ ID NO: 82 - protein, 216 aa, Erinaceus europaeus
RRIEPWEFEDFFDPRQFRPETCLLYEVRWGSSRNAWRSTARNTTRHAEVNFLERFAAERHFDKPVSCSITWFLSWSPCWECSQAIGAFLSQHPQVTLAIHVTRLFHHEDEQNRQGLRDLLARGVTLQVMGDSEYAHCWRTFVNSPPGAEGHYPRYPSDFTRLYALELHCIILGLPPCLEILRRYQNQFTLFRLVPQNCHYQMIPHLNFFVVRHYFF

SEQ ID NO: 83 - protein, 142 aa, Haliaeetus albicilla
RWKLQPNDFKRNYLPGQHPKVVYLLYEIRWSRGTIWRNWCSNNSTQHAEVNFLENCFKATPSVSCSITWVLSTTPCGKCSRRILEFLRVHPNVTLEIYAAKLFKHLDIRNRKGLRDLAMNGVIIRIMNLSDYSYCWKTFVAY

SEQ ID NO: 84 - protein, 221 aa, Callithrix jacchus
RRIEPWEFYISYDPKELCKETCLLYEIKWGMSWKIWRSSGKNTTNHVEINFIEKFTSERHFHLSVSCSITWFLSWSPCWECSQAIREFLSQHPGVTLVIYVARLFQHMDQQNRQGLRDLVNSGVTIQMMTVSEYYHCWRNFVNYPPGEEAHWPRHPPLWLMLYALELHCIILGLPPCLKISRRRQNRLTFFRLHLQNCHYQMIPRHILLATGLIQPSVTWR

SEQ ID NO: 85 - protein, 238 aa, Bos mutus
MIISWSTGPPAGDPTLRRRIEPWEFEFSFDPRKFCKEACLLYEIQWGNNRDVWRHSGKNTTKHVERNFIEKIASERYFCPSIRCFIFWYLSWSPCWECSKAIREFLNQHPNVTLVIYIARLFQHMDPQNRQGLKDLVQSGVTIQVMRAPEYEYCWRNFVNYPRGKEAHWPRYPPLWMNLYALELYCIILGLPPCLHISRRYQNQLIVFRLTLQNCHYQMIPPYILLATGMVQIPMTWR

SEQ ID NO: 86 - protein, 130 aa, Pterocles gutturalis
RWKIQPNYFKINNLPGQHPRVVCLLYAIRWSRSTLWKSWCSNNSTQHAEVNFLENCFKGNPSVFCFMTWPFFHTTPHGKCCRRTPEFLGVHPNVTLKIRAAKLFKHLDRYNQQGLRNVAMNGVVIRIINL

SEQ ID NO: 87 - protein, 198 aa, Homo sapiens [sequence omitted]

SEQ ID NO: 88 - protein, 224 aa, Homo sapiens
MAQKEEAAVATEAASQNGEDLENLDDPEKLKELIELPPFEIVTGERLPANFFKFQFRNVEYSSGRNKTFLCYVVEAQGKGGQVQASRGYLEDEHAAAHAEEAFFNTILPAFDPALRYNVTWYVSSSPCAACADRIIKTLSKTKNLRLLILVGRLFMWEEPEIQAALKKLKEAGCKLRIMKPQDFEYVWQNFVEQEEGESKAFQPWEDIQENFLYYEEKLADILK

SEQ ID NO: 89 - protein, 199 aa, Homo sapiens
MEASPASGPRHLMDPHIFTSNFNNGIGRHKTYLCYEVERLDNGTSVKMDQHRGFLHNQAKNLLCGFYGRHAELRFLDLVPSLQLDPAQIYRVTWFISWSPCFSWGCAGEVRAFLQENTHVRLRIFAARIYDYDPLYKEALQMLRDAGAQVSIMTYDEFKHCWDTFVDHQGCPFQPWDGLDEHSQALSGRLRAILQNQGN

SEQ ID NO: 90 - protein, 382 aa, Homo sapiens
MNPQIRNPMERMYRDTFYDNFENEPILYGRSYTWLCYEVKIKRGRSNLLWDTGVFRGQVYFKPQYHAEMCFLSWFCGNQLPAYKCFQITWFVSWTPCPDCVAKLAEFLSEHPNVTLTISAARLYYYWERDYRRALCRLSQAGARVTIMDYEEFAYCWENFVYNEGQQFMPWYKFDENYAFLHRTLKEILRYLMDPDTFTFNFNNDPLVLRRRQTYLCYEVERLDNGTWVLMDQHMGFLCNEAKNLLCGFYGRHAELRFLDLVPSLQLDPAQIYRVTWFISWSPCFSWGCAGEVRAFLQENTHVRLRIFAARIYDYDPLYKEALQMLRDAGAQVSIMTYDEFEYCWDTFVYRQGCPFQPWDGLEEHSQALSGRLRAILQNQGN

SEQ ID NO: 91 - protein, 190 aa, Homo sapiens
MNPQIRNPMKAMYPGTFYFQFKNLWEANDRNETWLCFTVEGIKRRSVVSWKTGVFRNQVDSETHCHAERCFLSWFCDDILSPNTKYQVTWYTSWSPCPDCAGEVAEFLARHSNVNLTIFTARLYYFQYPCYQEGLRSLSQEGVAVEIMDYEDFKYCWENFVYNDNEPFKPWKGLKTNFRLLKRRLRESLQ

SEQ ID NO: 92 - protein, 386 aa, Homo sapiens
MNPQIRNPMERMYRDTFYDNFENEPILYGRSYTWLCYEVKIKRGRSNLLWDTGVFRGPVLPKRQSNHRQEVYFRFENHAEMCFLSWFCGNRLPANRRFQITWFVSWNPCLPCVVKVTKFLAEHPNVTLTISAARLYYYRDRDWRWVLLRLHKAGARVKIMDYEDFAYCWENFVCNEGQPFMPWYKFDDNYASLHRTLKEILRNPMEAMYPHIFYFHFKNLLKACGRNESWLCFTMEVTKHHSAVFRKRGVFRNQVDPETHCHAERCFLSWFCDDILSPNTNYEVTWYTSWSPCPECAGEVAEFLARHSNVNLTIFTARLCYFWDTDYQEGLCSLSQEGASVKIMGYKDFVSCWKNFVYSDDEPFKPWKGLQTNFRLLKRRLREILQ

SEQ ID NO: 93 - protein, 373 aa, Homo sapiens
MKPHFRNTVERMYRDTFSYNFYNRPILSRRNTVWLCYEVKTKGPSRPRLDAKIFRGQVYSQPEHHAEMCFLSWFCGNQLPAYKCFQITWFVSWTPCPDCVAKLAEFLAEHPNVTLTISAARLYYYWERDYRRALCRLSQAGARVKIMDDEEFAYCWENFVYSEGQPFMPWYKFDDNYAFLHRTLKEILRNPMEAMYPHIFYFHFKNLRKAYGRNESWLCFTMEVVKHHSPVSWKRGVFRNQVDPETHCHAERCFLSWFCDDILSPNTNYEVTWYTSWSPCPECAGEVAEFLARHSNVNLTIFTARLYYFWDTDYQEGLRSLSQEGASVEIMGYKDFKYCWENFVYNDDEPFKPWKGLKYNFLFLDSKLQEILE

SEQ ID NO: 94 - protein, 384 aa, Homo sapiens
MKPHFRNTVERMYRDTFSYNFYNRPILSRRNTVWLCYEVKTKGPSRPPLDAKIFRGQVYSELKYHPEMRFFHWFSKWRKLHRDQEYEVTWYISWSPCTKCTRDMATFLAEDPKVTLTIFVARLYYFWDPDYQEALRSLCQKRDGPRATMKIMNYDEFQHCWSKFVYSQRELFEPWNNLPKYYILLHIMLGEILRHSMDPPTFTFNFNNEPWVRGRHETYLCYEVERMHNDTWVLLNQRRGFLCNQAPHKHGFLEGRHAELCFLDVIPFWKLDLDQDYRVTCFTSWSPCFSCAQEMAKFISKNKHVSLCIFTARIYDDQGRCQEGLRTLAEAGAKISIMTYSEFKHCWDTFVDHQGCPFQPWDGLDEHSQDLSGRLRAILQNQEN

SEQ ID NO: 95 - protein, 200 aa, Homo sapiens
MALLTAETFRLQFNNKRRLRRPYYPRKALLCYQLTPQNGSTPTRGYFENKKKCHAEICFINEIKSMGLDETQCYQVTCYLTWSPCSSCAWELVDFIKAHDHLNLGIFASRLYYHWCKPQQKGLRLLCGSQVPVEVMGFPEFADCWENFVDHEKPLSFNPYKMLEELDKNSRAIKRRLERIKIPGVRAQGRYMDILCDAEV

SEQ ID NO: 96 - protein, 208 aa, Petromyzon marinus
MTDAEYVRIHEKLDIYTFKKQFFNNKKSVSHRCYVLFELKRRGERRACFWGYAVNKPQSGTERGIHAEIFSIRKVEEYLRDNPGQFTINWYSSWSPCADCAEKILEWYNQELRGNGHTLKIWACKLYYEKNARNQIGLWNLRDNGVGLNVMVSEHYQCCRKIFIQSSHNQLNENRWLEKTLKRAEKRRSELSIMIQVKILHTTKSPAV

SEQ ID NO: 97 - protein, 208 aa, Petromyzon marinus
MTDAEYVRIHEKLDIYTFKKQFFNNKKSVSHRCYVLFELKRRGERRACFWGYAVNKPQSGTERGIHAEIFSIRKVEEYLRDNPGQFTINWYSSWSPCADCAEKILEWYNQELRGNGHTLKIWACKLYYEKNARNQIGLWNLRDNGVGLNVMVSEHYQCCRKIFIQSSHNQLNENRWLEKTLKRAEKWRSELSIMIQVKILHTTKSPAV

SEQ ID NO: 98 - protein, 167 aa, Escherichia coli
MSEVEFSHEYWMRHALTLAKRAWDEREVPVGAVLVHNNRVIGEGWNRPIGRHDPTAHAEIMALRQGGLVMQNYRLIDATLYVTLEPCVMCAGAMIHSRIGRVVFGARDAKTGAAGSLMDVLHHPGMNHRVEITEGILADECAALLSDFFRMRRQEIKAQKKAQSSTD

SEQ ID NO: 99 - protein, 156 aa, Staphylococcus aureus
MTNDIYFMTLAIEEAKKAAQLGEVPIGAIITKDDEVIARAHNLRETLQQPTAHAEHIAIERAAKVLGSWRLEGCTLYVTLEPCVMCAGTIVMSRIPRVVYGADDPKGGCSGSLMNLLQQSNFNHRAIVDKGVLKEACSTLLTTFFKNLRANKKSTN

SEQ ID NO: 100 - protein, 171 aa, Streptococcus pyogenes
MPYSLEEQTYFMQEALKEAEKSLQKAEIPIGCVIVKDGEIIGRGHNAREESNQAIMHAEMMAINEANAHEGNWRLLDTTLFVTIEPCVMCSGAIGLARIPHVIYGASNQKFGGADSLYQILTDERLNHRVQVERGLLAADCANIMQTFFRQGRERKKIAKHLIKEQSDPFD

SEQ ID NO: 101 - protein, 172 aa, Salmonella typhi
MSDVELDHEYWMRHALTLAKRAWDEREVPVGAVLVHNHRVIGEGWNRPIGRHDPTAHAEIMALRQGGLVLQNYRLLDTTLYVTLEPCVMCAGAMVHSRIGRVVFGARDAKTGAAGSLIDVLHHPGMNHRVEIIEGVLRDECATLLSDFFRMRRQEIKALKKADRAEGAGPAV

SEQ ID NO: 102 - protein, 151 aa, Aquifex aeolicus
MGKEYFLKVALREAKRAFEKGEVPVGAIIVKEGEIISKAHNSVEELKDPTAHAEMLAIKEACRRLNTKYLEGCELYVTLEPCIMCSYALVLSRIEKVIFSALDKKHGGVVSVFNILDEPTLNHRVKWEYYPLEEASELLSEFFKKLRNNII

SEQ ID NO: 103 - protein, 389 aa, Schizosaccharomyces pombe
MAGDSVKSAIIGIAGGPFSGKTQLCEQLLERLKSSAPSTFSKLIHLTSFLYPNSVDRYALSSYDIEAFKKVLSLISQGAEKICLPDGSCIKLPVDQNRIILIEGYYLLLPELLPYYTSKIFVYEDADTRLERCVLQRVKAEKGDLTKVLNDFVTLSKPAYDSSIHPTRENADIILPQKENIDTALLFVSQHLQDILAEMNKTSSSNTVKYDTQHETYMKLAHEILNLGPYFVIQPRSPGSCVFVYKGEVIGRGFNETNCSLSGIRHAELIAIEKILEHYPASVFKETTLYVTVEPCLMCAAALKQLHIKAVYFGCGNDRFGGCGSVFSINKDQSIDPSYPVYPGLFYSEAVMLMREFYVQENVKAPVPQSKKQRVLKREVKSLDLSRFK

SEQ ID NO: 104 - protein, 400 aa, Saccharomyces cerevisiae
MVSCQGTRPCIVNLLTMPSEDKLGEEISTRVINEYSKLKSACRPIIRPSGIREWTILAGVAAINRDGGANKIEILSIATGVKALPDSELQRSEGKILHDCHAEILALRGANTVLLNRIQNYNPSSGDKFIQHNDEIPARFNLKENWELALYISRLPCGDASMSFLNDNCKNDDFIKIEDSDEFQYVDRSVKTILRGRLNFNRRNVVRTKPGRYDSNITLSKSCSDKLLMKQRSSVLNCLNYELFEKPVFLKYIVIPNLEDETKHHLEQSFHTRLPNLDNEIKFLNCLKPFYDDKLDEEDVPGLMCSVKLFMDDFSTEEAILNGVRNGFYTKSSKPLRKHCQSQVSRFAQWELFKKIRPEYEGISYLEFKSRQKKRSQLIIAIKNILSPDGWIPTRTDDVK

SEQ ID NO: 105 - protein, 250 aa, Saccharomyces cerevisiae
MQHIKHMRTAVRLARYALDHDETPVACIFVHTPTGQVMAYGMNDTNKSLTGVAHAEFMGIDQIKAMLGSRGVVDVFKDITLYVTVEPCIMCASALKQLDIGKVVFGCGNERFGGNGTVLSVNHDTCTLVPKNNSAAGYESIPGILRKEAIMLLRYFYVRQNERAPKPRSKSDRVLDKNTFPPMEWSKYLNEEAFIETFGDDYRTCFANKVDLSSNSVDWDLIDSHQDNIIQELEEQCKMFKFNVHKKSKV

SEQ ID NO: 106 - protein, 182 aa, Arabidopsis thaliana
MEEDHCEDSHNYMGFALHQAKLALEALEVPVGCVFLEDGKVIASGRNRTNETRNATRHAEMEAIDQLVGQWQKDGLSPSQVAEKFSKCVLYVTCEPCIMCASALSFLGIKEVYYGCPNDKFGGCGSILSLHLGSEEAQRGKGYKCRGGIMAEEAVSLFKCFYEQGNPNAPKPHRPVVQRERT

SEQ ID NO: 107 - protein, 175 aa, Xenopus laevis
MEPLQITEEIQNWMHKAFQMAQDALNNGEVPVGCLMVYGNQVVGKGRNEVNETKNATQHAEMVAIDQVLDWCEMNSKKSTDVFENIVLYVTVEPCIMCAGALRLLKIPLVVYGCRNERFGGCGSVLNVSGDDIPDTGTKFKCIGGYQAEKAIELLKTFYKQENPNAPKSKVRKKE

SEQ ID NO: 108 - protein, 170 aa, Xenopus tropicalis
MTEEIQNWMHKAFQMAQDALNNGEVPVGCLMVYDNQVVGKGRNEVNETKNATRHAEMVAIDQVLDWCEKNSKKSRDVFENIVLYVTVEPCIMCAGALRLLKIPLVVYGCRNERFGGCGSVLNVAGDNIPDTGTEFKYIGGYQAEKAVELLKTFYKQENPNAPRSKVRKKE

SEQ ID NO: 109 - protein, 214 aa, Danio rerio
MQEVGVDPEKNDFLQPSDSEVQTWMAKAFDMAVEALENGEVPVGCLMVYNNEIIGKGRNEVNETKNATRHAEMVALDQVLDWCRLREKDCKEVCEQTVLYVTVEPCIMCAAALRLLRIPFVVYGCKNERFGGCGSVLDVSSDHLPHTGTSFKCIAGYRAEEAVEMLKTFYKQENPNAPKPKVRKDSINPQDGAAVIQVMRGPPDEETETIAHLS

SEQ ID NO: 110 - protein, 191 aa, Bos taurus
MEAKAGPTAATDGAYSVSAEETEKWMEQAMQMAKDALDNTEVPVGCLMVYNNEVVGKGRNEVNQTKNATRHAEMVAIDQALDWCRRRGRSPSEVFEHTVLYVTVEPCIMCAAALRLMRIPLVVYGCQNERFGGCGSVLDIASADLPSTGKPFQCTPGYRAEEAVEMLKTFYKQENPNAPKSKVRKKECHKS

SEQ ID NO: 111 - protein, 191 aa, Mus musculus
MEEKVESTTTPDGPCVVSVQETEKWMEEAMRMAKEALENIEVPVGCLMVYNNEVVGKGRNEVNQTKNATRHAEMVAIDQVLDWCHQHGQSPSTVFEHTVLYVTVEPCIMCAAALRLMKIPLVVYGCQNERFGGCGSVLNIASADLPNTGRPFQCIPGYRAEEAVELLKTFYKQENPNAPKSKVRKKDCQKS

SEQ ID NO: 112 - protein, 191 aa, Homo sapiens
MEAKAAPKPAASGACSVSAEETEKWMEEAMHMAKEALENTEVPVGCLMVYNNEVVGKGRNEVNQTKNATRHAEMVAIDQVLDWCRQSGKSPSEVFEHTVLYVTVEPCIMCAAALRLMKIPLVVYGCQNERFGGCGSVLNIASADLPNTGRPFQCIPGYRAEEAVEMLKTFYKQENPNAPKSKVRKKECQKS

SEQ ID NO: 113 - protein, 1623 aa, Artificial Sequence
  Description of Artificial Sequence: Synthetic polypeptide
MSSETGPVAVDPTLRRRIEPHEFEVFFDPRELRKETCLLYEINWGGRHSIWRHTSQNTNKHVEVNFIEKFTTERYFCPNTRCSITWFLSWSPCGECSRAITEFLSRYPHVTLFIYIARLYHHADPRNRQGLRDLISSGVTIQIMTEQESGYCWRNFVNYSPSNEAHWPRYPHLWVRLYVLELYCIILGLPPCLNILRRKQPQLTFFTIALQSCHYQRLPPHILWATGLKSGSETPGTSESATPESDKKYSIGLAIGTNSVGWAVITDEYKVPSKKFKVLGNTDRHSIKKNLIGALLFDSGETAEATRLKRTARRRYTRRKNRICYLQEIFSNEMAKVDDSFFHRLEESFLVEEDKKHERHPIFGNIVDEVAYHEKYPTIYHLRKKLVDSTDKADLRLIYLALAHMIKFRGHFLIEGDLNPDNSDVDKLFIQLVQTYNQLFEENPINASGVDAKAILSARLSKSRRLENLIAQLPGEKKNGLFGNLIALSLGLTPNFKSNFDLAEDAKLQLSKDTYDDDLDNLLAQIGDQYADLFLAAKNLSDAILLSDILRVNTEITKAPLSASMIKRYDEHHQDLTLLKALVRQQLPEKYKEIFFDQSKNGYAGYIDGGASQEEFYKFIKPILEKMDGTEELLVKLNREDLLRKQRTFDNGSIPHQIHLGELHAILRRQEDFYPFLKDNREKIEKILTFRIPYYVGPLARGNSRFAWMTRKSEETITPWNFEEVVDKGASAQSFIERMTNFDKNLPNEKVLPKHSLLYEYFTVYNELTKVKYVTEGMRKPAFLSGEQKKAIVDLLFKTNRKVTVKQLKEDYFKKIECFDSVEISGVEDRFNASLGTYHDLLKIIKDKDFLDNEENEDILEDIVLTLTLFEDREMIEERLKTYAHLFDDKVMKQLKRRRYTGWGRLSRKLINGIRDKQSGKTILDFLKSDGFANRNFMQLIHDDSLTFKEDIQKAQVSGQGDSLHEHIANLAGSPAIKKGILQTVKVVDELVKVMGRHKPENIVIEMARENQTTQKGQKNSRERMKRIEEGIKELGSQILKEHPVENTQLQNEKLYLYYLQNGRDMYVDQELDINRLSDYDVDAIVPQSFLKDDSIDNKVLTRSDKNRGKSDNVPSEEVVKKMKNYWRQLLNAKLITQRKFDNLTKAERGGLSELDKAGFIKRQLVETRQITKHVAQILDSRMNTKYDENDKLIREVKVITLKSKLVSDFRKDFQFYKVREINNYHHAHDAYLNAVVGTALIKKYPKLESEFVYGDYKVYDVRKMIAKSEQEIGKATAKYFFYSNIMNFFKTEITLANGEIRKRPLIETNGETGEIVWDKGRDFATVRKVLSMPQVNIVKKTEVQTGGFSKESILPKRNSDKLIARKKDWDPKKYGGFDSPTVAYSVLVVAKVEKGKSKKLKSVKELLGITIMERSSFEKNPIDFLEAKGYKEVKKDLIIKLPKYSLFELENGRKRMLASAGELQKGNELALPSKYVNFLYLASHYEKLKGSPEDNEQKQLFVEQHKHYLDEIIEQISEFSKRVILADANLDKVLSAYNKHRDKPIREQAENIIHLFTLTNLGAPAAFKYFDTTIDRKRYTSTKEVLDATLIHQSITGLYETRIDLSQLGGDSGGSPKKKRKV

SEQ ID NO: 114 - protein, 1710 aa, Artificial Sequence
  Description of Artificial Sequence: Synthetic polypeptide
MSSETGPVAVDPTLRRRIEPHEFEVFFDPRELRKETCLLYEINWGGRHSIWRHTSQNTNKHVEVNFIEKFTTERYFCPNTRCSITWFLSWSPCGECSRAITEFLSRYPHVTLFIYIARLYHHADPRNRQGLRDLISSGVTIQIMTEQESGYCWRNFVNYSPSNEAHWPRYPHLWVRLYVLELYCIILGLPPCLNILRRKQPQLTFFTIALQSCHYQRLPPHILWATGLKSGSETPGTSESATPESDKKYSIGLAIGTNSVGWAVITDEYKVPSKKFKVLGNTDRHSIKKNLIGALLFDSGETAEATRLKRTARRRYTRRKNRICYLQEIFSNEMAKVDDSFFHRLEESFLVEEDKKHERHPIFGNIVDEVAYHEKYPTIYHLRKKLVDSTDKADLRLIYLALAHMIKFRGHFLIEGDLNPDNSDVDKLFIQLVQTYNQLFEENPINASGVDAKAILSARLSKSRRLENLIAQLPGEKKNGLFGNLIALSLGLTPNFKSNFDLAEDAKLQLSKDTYDDDLDNLLAQIGDQYADLFLAAKNLSDAILLSDILRVNTEITKAPLSASMIKRYDEHHQDLTLLKALVRQQLPEKYKEIFFDQSKNGYAGYIDGGASQEEFYKFIKPILEKMDGTEELLVKLNREDLLRKQRTFDNGSIPHQIHLGELHAILRRQEDFYPFLKDNREKIEKILTFRIPYYVGPLARGNSRFAWMTRKSEETITPWNFEEVVDKGASAQSFIERMTNFDKNLPNEKVLPKHSLLYEYFTVYNELTKVKYVTEGMRKPAFLSGEQKKAIVDLLFKTNRKVTVKQLKEDYFKKIECFDSVEISGVEDRFNASLGTYHDLLKIIKDKDFLDNEENEDILEDIVLTLTLFEDREMIEERLKTYAHLFDDKVMKQLKRRRYTGWGRLSRKLINGIRDKQSGKTILDFLKSDGFANRNFMQLIHDDSLTFKEDIQKAQVSGQGDSLHEHIANLAGSPAIKKGILQTVKVVDELVKVMGRHKPENIVIEMARENQTTQKGQKNSRERMKRIEEGIKELGSQILKEHPVENTQLQNEKLYLYYLQNGRDMYVDQELDINRLSDYDVDAIVPQSFLKDDSIDNKVLTRSDKNRGKSDNVPSEEVVKKMKNYWRQLLNAKLITQRKFDNLTKAERGGLSELDKAGFIKRQLVETRQITKHVAQILDSRMNTKYDENDKLIREVKVITLKSKLVSDFRKDFQFYKVREINNYHHAHDAYLNAVVGTALIKKYPKLESEFVYGDYKVYDVRKMIAKSEQEIGKATAKYFFYSNIMNFFKTEITLANGEIRKRPLIETNGETGEIVWDKGRDFATVRKVLSMPQVNIVKKTEVQTGGFSKESILPKRNSDKLIARKKDWDPKKYGGFDSPTVAYSVLVVAKVEKGKSKKLKSVKELLGITIMERSSFEKNPIDFLEAKGYKEVKKDLIIKLPKYSLFELENGRKRMLASAGELQKGNELALPSKYVNFLYLASHYEKLKGSPEDNEQKQLFVEQHKHYLDEIIEQISEFSKRVILADANLDKVLSAYNKHRDKPIREQAENIIHLFTLTNLGAPAAFKYFDTTIDRKRYTSTKEVLDATLIHQSITGLYETRIDLSQLGGDSGGSTNLSDIIEKETGKQLVIQESILMLPEEVEEVIGNKPESDILVHTAYDESTDENVMLLTSDAPEYKPWALVIQDSNGENKIKMLSGGSPKKKRKV

SEQ ID NO: 115 - protein, 1710 aa, Artificial Sequence
  Description of Artificial Sequence: Synthetic polypeptide
MSSETGPVAVDPTLRRRIEPHEFEVFFDPRELRKETCLLYEINWGGRHSIWRHTSQNTNKHVEVNFIEKFTTERYFCPNTRCSITWFLSWSPCGECSRAITEFLSRYPHVTLFIYIARLYHHADPRNRQGLRDLISSGVTIQIMTEQESGYCWRNFVNYSPSNEAHWPRYPHLWVRLYVLELYCIILGLPPCLNILRRKQPQLTFFTIALQSCHYQRLPPHILWATGLKSGSETPGTSESATPESDKKYSIGLAIGTNSVGWAVITDEYKVPSKKFKVLGNTDRHSIKKNLIGALLFDSGETAEATRLKRTARRRYTRRKNRICYLQEIFSNEMAKVDDSFFHRLEESFLVEEDKKHERHPIFGNIVDEVAYHEKYPTIYHLRKKLVDSTDKADLRLIYLALAHMIKFRGHFLIEGDLNPDNSDVDKLFIQLVQTYNQLFEENPINASGVDAKAILSARLSKSRRLENLIAQLPGEKKNGLFGNLIALSLGLTPNFKSNFDLAEDAKLQLSKDTYDDDLDNLLAQIGDQYADLFLAAKNLSDAILLSDILRVNTEITKAPLSASMIKRYDEHHQDLTLLKALVRQQLPEKYKEIFFDQSKNGYAGYIDGGASQEEFYKFIKPILEKMDGTEELLVKLNREDLLRKQRTFDNGSIPHQIHLGELHAILRRQEDFYPFLKDNREKIEKILTFRIPYYVGPLARGNSRFAWMTRKSEETITPWNFEEVVDKGASAQSFIERMTNFDKNLPNEKVLPKHSLLYEYFTVYNELTKVKYVTEGMRKPAFLSGEQKKAIVDLLFKTNRKVTVKQLKEDYFKKIECFDSVEISGVEDRFNASLGTYHDLLKIIKDKDFLDNEENEDILEDIVLTLTLFEDREMIEERLKTYAHLFDDKVMKQLKRRRYTGWGRLSRKLINGIRDKQSGKTILDFLKSDGFANRNFMQLIHDDSLTFKEDIQKAQVSGQGDSLHEHIANLAGSPAIKKGILQTVKVVDELVKVMGRHKPENIVIEMARENQTTQKGQKNSRERMKRIEEGIKELGSQILKEHPVENTQLQNEKLYLYYLQNGRDMYVDQELDINRLSDYDVDHIVPQSFLKDDSIDNKVLTRSDKNRGKSDNVPSEEVVKKMKNYWRQLLNAKLITQRKFDNLTKAERGGLSELDKAGFIKRQLVETRQITKHVAQILDSRMNTKYDENDKLIREVKVITLKSKLVSDFRKDFQFYKVREINNYHHAHDAYLNAVVGTALIKKYPKLESEFVYGDYKVYDVRKMIAKSEQEIGKATAKYFFYSNIMNFFKTEITLANGEIRKRPLIETNGETGEIVWDKGRDFATVRKVLSMPQVNIVKKTEVQTGGFSKESILPKRNSDKLIARKKDWDPKKYGGFDSPTVAYSVLVVAKVEKGKSKKLKSVKELLGITIMERSSFEKNPIDFLEAKGYKEVKKDLIIKLPKYSLFELENGRKRMLASAGELQKGNELALPSKYVNFLYLASHYEKLKGSPEDNEQKQLFVEQHKHYLDEIIEQISEFSKRVILADANLDKVLSAYNKHRDKPIREQAENIIHLFTLTNLGAPAAFKYFDTTIDRKRYTSTKEVLDATLIHQSITGLYETRIDLSQLGGDSGGSTNLSDIIEKETGKQLVIQESILMLPEEVEEVIGNKPESDILVHTAYDESTDENVMLLTSDAPEYKPWALVIQDSNGENKIKMLSGGSPKKKRKV

SEQ ID NO: 116 - protein, 1689 aa, Artificial Sequence
  Description of Artificial Sequence: Synthetic polypeptide
MTDAEYVRIHEKLDIYTFKKQFFNNKKSVSHRCYVLFELKRRGERRACFWGYAVNKPQSGTERGIHAEIFSIRKVEEYLRDNPGQFTINWYSSWSPCADCAEKILEWYNQELRGNGHTLKIWACKLYYEKNARNQIGLWNLRDNGVGLNVMVSEHYQCCRKIFIQSSHNQLNENRWLEKTLKRAEKRRSELSIMIQVKILHTTKSPAVSGSETPGTSESATPESDKKYSIGLAIGTNSVGWAVITDEYKVPSKKFKVLGNTDRHSIKKNLIGALLFDSGETAEATRLKRTARRRYTRRKNRICYLQEIFSNEMAKVDDSFFHRLEESFLVEEDKKHERHPIFGNIVDEVAYHEKYPTIYHLRKKLVDSTDKADLRLIYLALAHMIKFRGHFLIEGDLNPDNSDVDKLFIQLVQTYNQLFEENPINASGVDAKAILSARLSKSRRLENLIAQLPGEKKNGLFGNLIALSLGLTPNFKSNFDLAEDAKLQLSKDTYDDDLDNLLAQIGDQYADLFLAAKNLSDAILLSDILRVNTEITKAPLSASMIKRYDEHHQDLTLLKALVRQQLPEKYKEIFFDQSKNGYAGYIDGGASQEEFYKFIKPILEKMDGTEELLVKLNREDLLRKQRTFDNGSIPHQIHLGELHAILRRQEDFYPFLKDNREKIEKILTFRIPYYVGPLARGNSRFAWMTRKSEETITPWNFEEVVDKGASAQSFIERMTNFDKNLPNEKVLPKHSLLYEYFTVYNELTKVKYVTEGMRKPAFLSGEQKKAIVDLLFKTNRKVTVKQLKEDYFKKIECFDSVEISGVEDRFNASLGTYHDLLKIIKDKDFLDNEENEDILEDIVLTLTLFEDREMIEERLKTYAHLFDDKVMKQLKRRRYTGWGRLSRKLINGIRDKQSGKTILDFLKSDGFANRNFMQLIHDDSLTFKEDIQKAQVSGQGDSLHEHIANLAGSPAIKKGILQTVKVVDELVKVMGRHKPENIVIEMARENQTTQKGQKNSRERMKRIEEGIKELGSQILKEHPVENTQLQNEKLYLYYLQNGRDMYVDQELDINRLSDYDVDHIVPQSFLKDDSIDNKVLTRSDKNRGKSDNVPSEEVVKKMKNYWRQLLNAKLITQRKFDNLTKAERGGLSELDKAGFIKRQLVETRQITKHVAQILDSRMNTKYDENDKLIREVKVITLKSKLVSDFRKDFQFYKVREINNYHHAHDAYLNAVVGTALIKKYPKLESEFVYGDYKVYDVRKMIAKSEQEIGKATAKYFFYSNIMNFFKTEITLANGEIRKRPLIETNGETGEIVWDKGRDFATVRKVLSMPQVNIVKKTEVQTGGFSKESILPKRNSDKLIARKKDWDPKKYGGFDSPTVAYSVLVVAKVEKGKSKKLKSVKELLGITIMERSSFEKNPIDFLEAKGYKEVKKDLIIKLPKYSLFELENGRKRMLASAGELQKGNELALPSKYVNFLYLASHYEKLKGSPEDNEQKQLFVEQHKHYLDEIIEQISEFSKRVILADANLDKVLSAYNKHRDKPIREQAENIIHLFTLTNLGAPAAFKYFDTTIDRKRYTSTKEVLDATLIHQSITGLYETRIDLSQLGGDSGGSTNLSDIIEKETGKQLVIQESILMLPEEVEEVIGNKPESDILVHTAYDESTDENVMLLTSDAPEYKPWALVIQDSNGENKIKMLSGGSPKKKRKV

SEQ ID NO: 117 - protein, 1679 aa, Artificial Sequence
  Description of Artificial Sequence: Synthetic polypeptide
MDSLLMNRRKFLYQFKNVRWAKGRRETYLCYVVKRRDSATSFSLDFGYLRNKNGCHVELLFLRYISDWDLDPGRCYRVTWFTSWSPCYDCARHVADFLRGNPNLSLRIFTARLYFCEDRKAEPEGLRRLHRAGVQIAIMTFKDYFYCWNTFVENHERTFKAWEGLHENSVRLSRQLRRILLPLYEVDDLRDAFRTLGLSGSETPGTSESATPESDKKYSIGLAIGTNSVGWAVITDEYKVPSKKFKVLGNTDRHSIKKNLIGALLFDSGETAEATRLKRTARRRYTRRKNRICYLQEIFSNEMAKVDDSFFHRLEESFLVEEDKKHERHPIFGNIVDEVAYHEKYPTIYHLRKKLVDSTDKADLRLIYLALAHMIKFRGHFLIEGDLNPDNSDVDKLFIQLVQTYNQLFEENPINASGVDAKAILSARLSKSRRLENLIAQLPGEKKNGLFGNLIALSLGLTPNFKSNFDLAEDAKLQLSKDTYDDDLDNLLAQIGDQYADLFLAAKNLSDAILLSDILRVNTEITKAPLSASMIKRYDEHHQDLTLLKALVRQQLPEKYKEIFFDQSKNGYAGYIDGGASQEEFYKFIKPILEKMDGTEELLVKLNREDLLRKQRTFDNGSIPHQIHLGELHAILRRQEDFYPFLKDNREKIEKILTFRIPYYVGPLARGNSRFAWMTRKSEETITPWNFEEVVDKGASAQSFIERMTNFDKNLPNEKVLPKHSLLYEYFTVYNELTKVKYVTEGMRKPAFLSGEQKKAIVDLLFKTNRKVTVKQLKEDYFKKIECFDSVEISGVEDRFNASLGTYHDLLKIIKDKDFLDNEENEDILEDIVLTLTLFEDREMIEERLKTYAHLFDDKVMKQLKRRRYTGWGRLSRKLINGIRDKQSGKTILDFLKSDGFANRNFMQLIHDDSLTFKEDIQKAQVSGQGDSLHEHIANLAGSPAIKKGILQTVKVVDELVKVMGRHKPENIVIEMARENQTTQKGQKNSRERMKRIEEGIKELGSQILKEHPVENTQLQNEKLYLYYLQNGRDMYVDQELDINRLSDYDVDHIVPQSFLKDDSIDNKVLTRSDKNRGKSDNVPSEEVVKKMKNYWRQLLNAKLITQRKFDNLTKAERGGLSELDKAGFIKRQLVETRQITKHVAQILDSRMNTKYDENDKLIREVKVITLKSKLVSDFRKDFQFYKVREINNYHHAHDAYLNAVVGTALIKKYPKLESEFVYGDYKVYDVRKMIAKSEQEIGKATAKYFFYSNIMNFFKTEITLANGEIRKRPLIETNGETGEIVWDKGRDFATVRKVLSMPQVNIVKKTEVQTGGFSKESILPKRNSDKLIARKKDWDPKKYGGFDSPTVAYSVLVVAKVEKGKSKKLKSVKELLGITIMERSSFEKNPIDFLEAKGYKEVKKDLIIKLPKYSLFELENGRKRMLASAGELQKGNELALPSKYVNFLYLASHYEKLKGSPEDNEQKQLFVEQHKHYLDEIIEQISEFSKRVILADANLDKVLSAYNKHRDKPIREQAENIIHLFTLTNLGAPAAFKYFDTTIDRKRYTSTKEVLDATLIHQSITGLYETRIDLSQLGGDSGGSTNLSDIIEKETGKQLVIQESILMLPEEVEEVIGNKPESDILVHTAYDESTDENVMLLTSDAPEYKPWALVIQDSNGENKIKMLSGGSPKKKRKV

SEQ ID NO: 118 - protein, 1899 aa, Artificial Sequence
  Description of Artificial Sequence: Synthetic polypeptide
MAKPAKRIKSAAAAYVPQNRDAVITDIKRIGDLQREASRLETEMNDAIAEITEKFAARIAPIKTDIETLSKGVQGWCEANRDELTNGGKVKTANLVTGDVSWRVRPPSVSIRGMDAVMETLERLGLQRFIRTKQEINKEAILLEPKAVAGVAGITVKSGIEDFSIIPFEQEAGISGSETPGTSESATPESSSETGPVAVDPTLRRRIEPHEFEVFFDPRELRKETCLLYEINWGGRHSIWRHTSQNTNKHVEVNFIEKFTTERYFCPNTRCSITWFLSWSPCGECSRAITEFLSRYPHVTLFIYIARLYHHADPRNRQGLRDLISSGVTIQIMTEQESGYCWRNFVNYSPSNEAHWPRYPHLWVRLYVLELYCIILGLPPCLNILRRKQPQLTFFTIALQSCHYQRLPPHILWATGLKSGSETPGTSESATPESDKKYSIGLAIGTNSVGWAVITDEYKVPSKKFKVLGNTDRHSIKKNLIGALLFDSGETAEATRLKRTARRRYTRRKNRICYLQEIFSNEMAKVDDSFFHRLEESFLVEEDKKHERHPIFGNIVDEVAYHEKYPTIYHLRKKLVDSTDKADLRLIYLALAHMIKFRGHFLIEGDLNPDNSDVDKLFIQLVQTYNQLFEENPINASGVDAKAILSARLSKSRRLENLIAQLPGEKKNGLFGNLIALSLGLTPNFKSNFDLAEDAKLQLSKDTYDDDLDNLLAQIGDQYADLFLAAKNLSDAILLSDILRVNTEITKAPLSASMIKRYDEHHQDLTLLKALVRQQLPEKYKEIFFDQSKNGYAGYIDGGASQEEFYKFIKPILEKMDGTEELLVKLNREDLLRKQRTFDNGSIPHQIHLGELHAILRRQEDFYPFLKDNREKIEKILTFRIPYYVGPLARGNSRFAWMTRKSEETITPWNFEEVVDKGASAQSFIERMTNFDKNLPNEKVLPKHSLLYEYFTVYNELTKVKYVTEGMRKPAFLSGEQKKAIVDLLFKTNRKVTVKQLKEDYFKKIECFDSVEISGVEDRFNASLGTYHDLLKIIKDKDFLDNEENEDILEDIVLTLTLFEDREMIEERLKTYAHLFDDKVMKQLKRRRYTGWGRLSRKLINGIRDKQSGKTILDFLKSDGFANRNFMQLIHDDSLTFKEDIQKAQVSGQGDSLHEHIANLAGSPAIKKGILQTVKVVDELVKVMGRHKPENIVIEMARENQTTQKGQKNSRERMKRIEEGIKELGSQILKEHPVENTQLQNEKLYLYYLQNGRDMYVDQELDINRLSDYDVDHIVPQSFLKDDSIDNKVLTRSDKNRGKSDNVPSEEVVKKMKNYWRQLLNAKLITQRKFDNLTKAERGGLSELDKAGFIKRQLVETRQITKHVAQILDSRMNTKYDENDKLIREVKVITLKSKLVSDFRKDFQFYKVREINNYHHAHDAYLNAVVGTALIKKYPKLESEFVYGDYKVYDVRKMIAKSEQEIGKATAKYFFYSNIMNFFKTEITLANGEIRKRPLIETNGETGEIVWDKGRDFATVRKVLSMPQVNIVKKTEVQTGGFSKESILPKRNSDKLIARKKDWDPKKYGGFDSPTVAYSVLVVAKVEKGKSKKLKSVKELLGITIMERSSFEKNPIDFLEAKGYKEVKKDLIIKLPKYSLFELENGRKRMLASAGELQKGNELALPSKYVNFLYLASHYEKLKGSPEDNEQKQLFVEQHKHYLDEIIEQISEFSKRVILADANLDKVLSAYNKHRDKPIREQAENIIHLFTLTNLGAPAAFKYFDTTIDRKRYTSTKEVLDATLIHQSITGLYETRIDLSQLGGDSGGSTNLSDIIEKETGKQLVIQESILMLPEEVEEVIGNKPESDILVHTAYDESTDENVMLLTSDAPEYKPWALVIQDSNGENKIKMLSGGSPKKKRKV

SEQ ID NO: 119 - protein, 1618 aa, Artificial Sequence
  Description of Artificial Sequence: Synthetic polypeptide
MAKPAKRIKSAAAAYVPQNRDAVITDIKRIGDLQREASRLETEMNDAIAEITEKFAARIAPIKTDIETLSKGVQGWCEANRDELTNGGKVKTANLVTGDVSWRVRPPSVSIRGMDAVMETLERLGLQRFIRTKQEINKEAILLEPKAVAGVAGITVKSGIEDFSIIPFEQEAGISGSETPGTSESATPESSSETGPVAVDPTLRRRIEPHEFEVFFDPRELRKETCLLYEINWGGRHSIWRHTSQNTNKHVEVNFIEKFTTERYFCPNTRCSITWFLSWSPCGECSRAITEFLSRYPHVTLFIYIARLYHHADPRNRQGLRDLISSGVTIQIMTEQESGYCWRNFVNYSPSNEAHWPRYPHLWVRLYVLELYCIILGLPPCLNILRRKQPQLTFFTIALQSCHYQRLPPHILWATGLKSGSETPGTSESATPESGKRNYILGLAIGITSVGYGIIDYETRDVIDAGVRLFKEANVENNEGRRSKRGARRLKRRRRHRIQRVKKLLFDYNLLTDHSELSGINPYEARVKGLSQKLSEEEFSAALLHLAKRRGVHNVNEVEEDTGNELSTKEQISRNSKALEEKYVAELQLERLKKDGEVRGSINRFKTSDYVKEAKQLLKVQKAYHQLDQSFIDTYIDLLETRRTYYEGPGEGSPFGWKDIKEWYEMLMGHCTYFPEELRSVKYAYNADLYNALNDLNNLVITRDENEKLEYYEKFQIIENVFKQKKKPTLKQIAKEILVNEEDIKGYRVTSTGKPEFTNLKVYHDIKDITARKEIIENAELLDQIAKILTIYQSSEDIQEELTNLNSELTQEEIEQISNLKGYTGTHNLSLKAINLILDELWHTNDNQIAIFNRLKLVPKKVDLSQQKEIPTTLVDDFILSPVVKRSFIQSIKVINAIIKKYGLPNDIIIELAREKNSKDAQKMINEMQKRNRQTNERIEEIIRTTGKENAKYLIEKIKLHDMQEGKCLYSLEAIPLEDLLNNPFNYEVDHIIPRSVSFDNSFNNKVLVKQEENSKKGNRTPFQYLSSSDSKISYETFKKHILNLAKGKGRISKTKKEYLLEERDINRFSVQKDFINRNLVDTRYATRGLMNLLRSYFRVNNLDVKVKSINGGFTSFLRRKWKFKKERNKGYKHHAEDALIIANADFIFKEWKKLDKAKKVMENQMFEEKQAESMPEIETEQEYKEIFITPHQIKHIKDFKDYKYSHRVDKKPNRELINDTLYSTRKDDKGNTLIVNNLNGLYDKDNDKLKKLINKSPEKLLMYHHDPQTYQKLKLIMEQYGDEKNPLYKYYEETGNYLTKYSKKDNGPVIKKIKYYGNKLNAHLDITDDYPNSRNKVVKLSLKPYRFDVYLDNGVYKFVTVKNLDVIKKENYYEVNSKCYEEAKKLKKISNQAEFIASFYNNDLIKINGELYRVIGVNNDLLNRIEVNMIDITYREYLENMNDKRPPRIIKTIASKTQSIKKYSTDILGNLYEVKSKKHPQIIKKGGSPKKKRKVSSDYKDHDGDYKDHDIDYKDDDDKSGGSTNLSDIIEKETGKQLVIQESILMLPEEVEEVIGNKPESDILVHTAYDESTDENVMLLTSDAPEYKPWALVIQDSNGENKIKMLSGGSPKKKRKV

SEQ ID NO: 120 - protein, 1824 aa, Artificial Sequence
  Description of Artificial Sequence: Synthetic polypeptide
MSSETGPVAVDPTLRRRIEPHEFEVFFDPRELRKETCLLYEINWGGRHSIWRHTSQNTNKHVEVNFIEKFTTERYFCPNTRCSITWFLSWSPCGECSRAITEFLSRYPHVTLFIYIARLYHHADPRNRQGLRDLISSGVTIQIMTEQESGYCWRNFVNYSPSNEAHWPRYPHLWVRLYVLELYCIILGLPPCLNILRRKQPQLTFFTIALQSCHYQRLPPHILWATGLKSGGSSGGSSGSETPGTSESATPESSGGSSGGSDKKYSIGLAIGTNSVGWAVITDEYKVPSKKFKVLGNTDRHSIKKNLIGALLFDSGETAEATRLKRTARRRYTRRKNRICYLQEIFSNEMAKVDDSFFHRLEESFLVEEDKKHERHPIFGNIVDEVAYHEKYPTIYHLRKKLVDSTDKADLRLIYLALAHMIKFRGHFLIEGDLNPDNSDVDKLFIQLVQTYNQLFEENPINASGVDAKAILSARLSKSRRLENLIAQLPGEKKNGLFGNLIALSLGLTPNFKSNFDLAEDAKLQLSKDTYDDDLDNLLAQIGDQYADLFLAAKNLSDAILLSDILRVNTEITKAPLSASMIKRYDEHHQDLTLLKALVRQQLPEKYKEIFFDQSKNGYAGYIDGGASQEEFYKFIKPILEKMDGTEELLVKLNREDLLRKQRTFDNGSIPHQIHLGELHAILRRQEDFYPFLKDNREKIEKILTFRIPYYVGPLARGNSRFAWMTRKSEETITPWNFEEVVDKGASAQSFIERMTNFDKNLPNEKVLPKHSLLYEYFTVYNELTKVKYVTEGMRKPAFLSGEQKKAIVDLLFKTNRKVTVKQLKEDYFKKIECFDSVEISGVEDRFNASLGTYHDLLKIIKDKDFLDNEENEDILEDIVLTLTLFEDREMIEERLKTYAHLFDDKVMKQLKRRRYTGWGRLSRKLINGIRDKQSGKTILDFLKSDGFANRNFMQLIHDDSLTFKEDIQKAQVSGQGDSLHEHIANLAGSPAIKKGILQTVKVVDELVKVMGRHKPENIVIEMARENQTTQKGQKNSRERMKRIEEGIKELGSQILKEHPVENTQLQNEKLYLYYLQNGRDMYVDQELDINRLSDYDVDHIVPQSFLKDDSIDNKVLTRSDKNRGKSDNVPSEEVVKKMKNYWRQLLNAKLITQRKFDNLTKAERGGLSELDKAGFIKRQLVETRQITKHVAQILDSRMNTKYDENDKLIREVKVITLKSKLVSDFRKDFQFYKVREINNYHHAHDAYLNAVVGTALIKKYPKLESEFVYGDYKVYDVRKMIAKSEQEIGKATAKYFFYSNIMNFFKTEITLANGEIRKRPLIETNGETGEIVWDKGRDFATVRKVLSMPQVNIVKKTEVQTGGFSKESILPKRNSDKLIARKKDWDPKKYGGFDSPTVAYSVLVVAKVEKGKSKKLKSVKELLGITIMERSSFEKNPIDFLEAKGYKEVKKDLIIKLPKYSLFELENGRKRMLASAGELQKGNELALPSKYVNFLYLASHYEKLKGSPEDNEQKQLFVEQHKHYLDEIIEQISEFSKRVILADANLDKVLSAYNKHRDKPIREQAENIIHLFTLTNLGAPAAFKYFDTTIDRKRYTSTKEVLDATLIHQSITGLYETRIDLSQLGGDSGGSGGSGGSTNLSDIIEKETGKQLVIQESILMLPEEVEEVIGNKPESDILVHTAYDESTDENVMLLTSDAPEYKPWALVIQDSNGENKIKMLSGGSGGSGGSTNLSDIIEKETGKQLVIQESILMLPEEVEEVIGNKPESDILVHTAYDESTDENVMLLTSDAPEYKPWALVIQDSNGENKIKMLSGGSPKKKRK

SEQ ID NO: 121 - protein, 2013 aa, Artificial Sequence
  Description of Artificial Sequence: Synthetic polypeptide
MAKPAKRIKSAAAAYVPQNRDAVITDIKRIGDLQREASRLETEMNDAIAEITEKFAARIAPIKTDIETLSKGVQGWCEANRDELTNGGKVKTANLVTGDVSWRVRPPSVSIRGMDAVMETLERLGLQRFIRTKQEINKEAILLEPKAVAGVAGITVKSGIEDFSIIPFEQEAGISGSETPGTSESATPESSSETGPVAVDPTLRRRIEPHEFEVFFDPRELRKETCLLYEINWGGRHSIWRHTSQNTNKHVEVNFIEKFTTERYFCPNTRCSITWFLSWSPCGECSRAITEFLSRYPHVTLFIYIARLYHHADPRNRQGLRDLISSGVTIQIMTEQESGYCWRNFVNYSPSNEAHWPRYPHLWVRLYVLELYCIILGLPPCLNILRRKQPQLTFFTIALQSCHYQRLPPHILWATGLKSGGSSGGSSGSETPGTSESATPESSGGSSGGSDKKYSIGLAIGTNSVGWAVITDEYKVPSKKFKVLGNTDRHSIKKNLIGALLFDSGETAEATRLKRTARRRYTRRKNRICYLQEIFSNEMAKVDDSFFHRLEESFLVEEDKKHERHPIFGNIVDEVAYHEKYPTIYHLRKKLVDSTDKADLRLIYLALAHMIKFRGHFLIEGDLNPDNSDVDKLFIQLVQTYNQLFEENPINASGVDAKAILSARLSKSRRLENLIAQLPGEKKNGLFGNLIALSLGLTPNFKSNFDLAEDAKLQLSKDTYDDDLDNLLAQIGDQYADLFLAAKNLSDAILLSDILRVNTEITKAPLSASMIKRYDEHHQDLTLLKALVRQQLPEKYKEIFFDQSKNGYAGYIDGGASQEEFYKFIKPILEKMDGTEELLVKLNREDLLRKQRTFDNGSIPHQIHLGELHAILRRQEDFYPFLKDNREKIEKILTFRIPYYVGPLARGNSRFAWMTRKSEETITPWNFEEVVDKGASAQSFIERMTNFDKNLPNEKVLPKHSLLYEYFTVYNELTKVKYVTEGMRKPAFLSGEQKKAIVDLLFKTNRKVTVKQLKEDYFKKIECFDSVEISGVEDRFNASLGTYHDLLKIIKDKDFLDNEENEDILEDIVLTLTLFEDREMIEERLKTYAHLFDDKVMKQLKRRRYTGWGRLSRKLINGIRDKQSGKTILDFLKSDGFANRNFMQLIHDDSLTFKEDIQKAQVSGQGDSLHEHIANLAGSPAIKKGILQTVKVVDELVKVMGRHKPENIVIEMARENQTTQKGQKNSRERMKRIEEGIKELGSQILKEHPVENTQLQNEKLYLYYLQNGRDMYVDQELDINRLSDYDVDHIVPQSFLKDDSIDNKVLTRSDKNRGKSDNVPSEEVVKKMKNYWRQLLNAKLITQRKFDNLTKAERGGLSELDKAGFIKRQLVETRQITKHVAQILDSRMNTKYDENDKLIREVKVITLKSKLVSDFRKDFQFYKVREINNYHHAHDAYLNAVVGTALIKKYPKLESEFVYGDYKVYDVRKMIAKSEQEIGKATAKYFFYSNIMNFFKTEITLANGEIRKRPLIETNGETGEIVWDKGRDFATVRKVLSMPQVNIVKKTEVQTGGFSKESILPKRNSDKLIARKKDWDPKKYGGFDSPTVAYSVLVVAKVEKGKSKKLKSVKELLGITIMERSSFEKNPIDFLEAKGYKEVKKDLIIKLPKYSLFELENGRKRMLASAGELQKGNELALPSKYVNFLYLASHYEKLKGSPEDNEQKQLFVEQHKHYLDEIIEQISEFSKRVILADANLDKVLSAYNKHRDKPIREQAENIIHLFTLTNLGAPAAFKYFDTTIDRKRYTSTKEVLDATLIHQSITGLYETRIDLSQLGGDSGGSGGSGGSTNLSDIIEKETGKQLVIQESILMLPEEVEEVIGNKPESDILVHTAYDESTDENVMLLTSDAPEYKPWALVIQDSNGENKIKMLSGGSGGSGGSTNLSDIIEKETGKQLVIQESILMLPEEVEEVIGNKPESDILVHTAYDESTDENVMLLTSDAPEYKPWALVIQDSNGENKIKMLSGGSPKKKRK

SEQ ID NO: 122 - protein, 1544 aa, Artificial Sequence
  Description of Artificial Sequence: Synthetic polypeptide
MSSETGPVAVDPTLRRRIEPHEFEVFFDPRELRKETCLLYEINWGGRHSIWRHTSQNTNKHVEVNFIEKFTTERYFCPNTRCSITWFLSWSPCGECSRAITEFLSRYPHVTLFIYIARLYHHADPRNRQGLRDLISSGVTIQIMTEQESGYCWRNFVNYSPSNEAHWPRYPHLWVRLYVLELYCIILGLPPCLNILRRKQPQLTFFTIALQSCHYQRLPPHILWATGLKSGGSSGGSSGSETPGTSESATPESSGGSSGGSGKRNYILGLAIGITSVGYGIIDYETRDVIDAGVRLFKEANVENNEGRRSKRGARRLKRRRRHRIQRVKKLLFDYNLLTDHSELSGINPYEARVKGLSQKLSEEEFSAALLHLAKRRGVHNVNEVEEDTGNELSTKEQISRNSKALEEKYVAELQLERLKKDGEVRGSINRFKTSDYVKEAKQLLKVQKAYHQLDQSFIDTYIDLLETRRTYYEGPGEGSPFGWKDIKEWYEMLMGHCTYFPEELRSVKYAYNADLYNALNDLNNLVITRDENEKLEYYEKFQIIENVFKQKKKPTLKQIAKEILVNEEDIKGYRVTSTGKPEFTNLKVYHDIKDITARKEIIENAELLDQIAKILTIYQSSEDIQEELTNLNSELTQEEIEQISNLKGYTGTHNLSLKAINLILDELWHTNDNQIAIFNRLKLVPKKVDLSQQKEIPTTLVDDFILSPVVKRSFIQSIKVINAIIKKYGLPNDIIIELAREKNSKDAQKMINEMQKRNRQTNERIEEIIRTTGKENAKYLIEKIKLHDMQEGKCLYSLEAIPLEDLLNNPFNYEVDHIIPRSVSFDNSFNNKVLVKQEENSKKGNRTPFQYLSSSDSKISYETFKKHILNLAKGKGRISKTKKEYLLEERDINRFSVQKDFINRNLVDTRYATRGLMNLLRSYFRVNNLDVKVKSINGGFTSFLRRKWKFKKERNKGYKHHAEDALIIANADFIFKEWKKLDKAKKVMENQMFEEKQAESMPEIETEQEYKEIFITPHQIKHIKDFKDYKYSHRVDKKPNRELINDTLYSTRKDDKGNTLIVNNLNGLYDKDNDKLKKLINKSPEKLLMYHHDPQTYQKLKLIMEQYGDEKNPLYKYYEETGNYLTKYSKKDNGPVIKKIKYYGNKLNAHLDITDDYPNSRNKVVKLSLKPYRFDVYLDNGVYKFVTVKNLDVIKKENYYEVNSKCYEEAKKLKKISNQAEFIASFYNNDLIKINGELYRVIGVNNDLLNRIEVNMIDITYREYLENMNDKRPPRIIKTIASKTQSIKKYSTDILGNLYEVKSKKHPQIIKKGGSPKKKRKVSSDYKDHDGDYKDHDIDYKDDDDKSGGSGGSGGSTNLSDIIEKETGKQLVIQESILMLPEEVEEVIGNKPESDILVHTAYDESTDENVMLLTSDAPEYKPWALVIQDSNGENKIKMLSGGSGGSGGSTNLSDIIEKETGKQLVIQESILMLPEEVEEVIGNKPESDILVHTAYDESTDENVMLLTSDAPEYKPWALVIQDSNGENKIKMLSGGSPKKKRKV

SEQ ID NO: 123 - protein, 1733 aa, Artificial Sequence
  Description of Artificial Sequence: Synthetic polypeptide
MAKPAKRIKSAAAAYVPQNRDAVITDIKRIGDLQREASRLETEMNDAIAEITEKFAARIAPIKTDIETLSKGVQGWCEANRDELTNGGKVKTANLVTGDVSWRVRPPSVSIRGMDAVMETLERLGLQRFIRTKQEINKEAILLEPKAVAGVAGITVKSGIEDFSIIPFEQEAGISGSETPGTSESATPESSSETGPVAVDPTLRRRIEPHEFEVFFDPRELRKETCLLYEINWGGRHSIWRHTSQNTNKHVEVNFIEKFTTERYFCPNTRCSITWFLSWSPCGECSRAITEFLSRYPHVTLFIYIARLYHHADPRNRQGLRDLISSGVTIQIMTEQESGYCWRNFVNYSPSNEAHWPRYPHLWVRLYVLELYCIILGLPPCLNILRRKQPQLTFFTIALQSCHYQRLPPHILWATGLKSGGSSGGSSGSETPGTSESATPESSGGSSGGSGKRNYILGLAIGITSVGYGIIDYETRDVIDAGVRLFKEANVENNEGRRSKRGARRLKRRRRHRIQRVKKLLFDYNLLTDHSELSGINPYEARVKGLSQKLSEEEFSAALLHLAKRRGVHNVNEVEEDTGNELSTKEQISRNSKALEEKYVAELQLERLKKDGEVRGSINRFKTSDYVKEAKQLLKVQKAYHQLDQSFIDTYIDLLETRRTYYEGPGEGSPFGWKDIKEWYEMLMGHCTYFPEELRSVKYAYNADLYNALNDLNNLVITRDENEKLEYYEKFQIIENVFKQKKKPTLKQIAKEILVNEEDIKGYRVTSTGKPEFTNLKVYHDIKDITARKEIIENAELLDQIAKILTIYQSSEDIQEELTNLNSELTQEEIEQISNLKGYTGTHNLSLKAINLILDELWHTNDNQIAIFNRLKLVPKKVDLSQQKEIPTTLVDDFILSPVVKRSFIQSIKVINAIIKKYGLPNDIIIELAREKNSKDAQKMINEMQKRNRQTNERIEEIIRTTGKENAKYLIEKIKLHDMQEGKCLYSLEAIPLEDLLNNPFNYEVDHIIPRSVSFDNSFNNKVLVKQEENSKKGNRTPFQYLSSSDSKISYETFKKHILNLAKGKGRISKTKKEYLLEERDINRFSVQKDFINRNLVDTRYATRGLMNLLRSYFRVNNLDVKVKSINGGFTSFLRRKWKFKKERNKGYKHHAEDALIIANADFIFKEWKKLDKAKKVMENQMFEEKQAESMPEIETEQEYKEIFITPHQIKHIKDFKDYKYSHRVDKKPNRELINDTLYSTRKDDKGNTLIVNNLNGLYDKDNDKLKKLINKSPEKLLMYHHDPQTYQKLKLIMEQYGDEKNPLYKYYEETGNYLTKYSKKDNGPVIKKIKYYGNKLNAHLDITDDYPNSRNKVVKLSLKPYRFDVYLDNGVYKFVTVKNLDVIKKENYYEVNSKCYEEAKKLKKISNQAEFIASFYNNDLIKINGELYRVIGVNNDLLNRIEVNMIDITYREYLENMNDKRPPRIIKTIASKTQSIKKYSTDILGNLYEVKSKKHPQIIKKGGSPKKKRKVSSDYKDHDGDYKDHDIDYKDDDDKSGGSGGSGGSTNLSDIIEKETGKQLVIQESILMLPEEVEEVIGNKPESDILVHTAYDESTDENVMLLTSDAPEYKPWALVIQDSNGENKIKMLSGGSGGSGGSTNLSDIIEKETGKQLVIQESILMLPEEVEEVIGNKPESDILVHTAYDESTDENVMLLTSDAPEYKPWALVIQDSNGENKIKMLSGGSPKKKRKV

SEQ ID NO: 124 - protein, 1625 aa, Artificial Sequence
  Description of Artificial Sequence: Synthetic polypeptide
MKRTADGSEFESPKKKRKVSGGSSGGSSGSETPGTSESATPESSGGSSGGSDKKYSIGLAIGTNSVGWAVITDEYKVPSKKFKVLGNTDRHSIKKNLIGALLFDSGETAEATRLKRTARRRYTRRKNRICYLQEIFSNEMAKVDDSFFHRLEESFLVEEDKKHERHPIFGNIVDEVAYHEKYPTIYHLRKKLVDSTDKADLRLIYLALAHMIKFRGHFLIEGDLNPDNSDVDKLFIQLVQTYNQLFEENPINASGVDAKAILSARLSKSRRLENLIAQLPGEKKNGLFGNLIALSLGLTPNFKSNFDLAEDAKLQLSKDTYDDDLDNLLAQIGDQYADLFLAAKNLSDAILLSDILRVNTEITKAPLSASMIKRYDEHHQDLTLLKALVRQQLPEKYKEIFFDQSKNGYAGYIDGGASQEEFYKFIKPILEKMDGTEELLVKLNREDLLRKQRTFDNGSIPHQIHLGELHAILRRQEDFYPFLKDNREKIEKILTFRIPYYVGPLARGNSRFAWMTRKSEETITPWNFEEVVDKGASAQSFIERMTNFDKNLPNEKVLPKHSLLYEYFTVYNELTKVKYVTEGMRKPAFLSGEQKKAIVDLLFKTNRKVTVKQLKEDYFKKIECFDSVEISGVEDRFNASLGTYHDLLKIIKDKDFLDNEENEDILEDIVLTLTLFEDREMIEERLKTYAHLFDDKVMKQLKRRRYTGWGRLSRKLINGIRDKQSGKTILDFLKSDGFANRNFMQLIHDDSLTFKEDIQKAQVSGQGDSLHEHIANLAGSPAIKKGILQTVKVVDELVKVMGRHKPENIVIEMARENQTTQKGQKNSRERMKRIEEGIKELGSQILKEHPVENTQLQNEKLYLYYLQNGRDMYVDQELDINRLSDYDVDHIVPQSFLKDDSIDNKVLTRSDKNRGKSDNVPSEEVVKKMKNYWRQLLNAKLITQRKFDNLTKAERGGLSELDKAGFIKRQLVETRQITKHVAQILDSRMNTKYDENDKLIREVKVITLKSKLVSDFRKDFQFYKVREINNYHHAHDAYLNAVVGTALIKKYPKLESEFVYGDYKVYDVRKMIAKSEQEIGKATAKYFFYSNIMNFFKTEITLANGEIRKRPLIETNGETGEIVWDKGRDFATVRKVLSMPQVNIVKKTEVQTGGFSKESILPKRNSDKLIARKKDWDPKKYGGFDSPTVAYSVLVVAKVEKGKSKKLKSVKELLGITIMERSSFEKNPIDFLEAKGYKEVKKDLIIKLPKYSLFELENGRKRMLASAGELQKGNELALPSKYVNFLYLASHYEKLKGSPEDNEQKQLFVEQHKHYLDEIIEQISEFSKRVILADANLDKVLSAYNKHRDKPIREQAENIIHLFTLTNLGAPAAFKYFDTTIDRKRYTSTKEVLDATLIHQSITGLYETRIDLSQLGGDSGGSGGSGGSTNLSDIIEKETGKQLVIQESILMLPEEVEEVIGNKPESDILVHTAYDESTDENVMLLTSDAPEYKPWALVIQDSNGENKIKMLSGGSGGSGGSTNLSDIIEKETGKQLVIQESILMLPEEVEEVIGNKPESDILVHTAYDESTDENVMLLTSDAPEYKPWALVIQDSNGENKIKMLSGGSKRTADGSEFEPKKKRKV

SEQ ID NO: 125 - protein, 228 aa, Rattus sp.
SSETGPVAVDPTLRRRIEPHEFEVFFDPRELRKETCLLYEINWGGRHSIWRHTSQNTNKHVEVNFIEKFTTERYFCPNTRCSITWFLSWSPCGECSRAITEFLSRYPHVTLFIYIARLYHHADPRNRQGLRDLISSGVTIQIMTEQESGYCWRNFVNYSPSNEAHWPRYPHLWVRLYVLELYCIILGLPPCLNILRRKQPQLTFFTIALQSCHYQRLPPHILWATGLK

SEQ ID NO: 126 - protein, 228 aa, Artificial Sequence
  Description of Artificial Sequence: Synthetic polypeptide
SSETGPVAVDPTLRRRIEPHEFEVFFDPRELRKETCLLYEIKWGTSHKIWRHSSKNTTKHVEVNFIEKFTSERHFCPSTSCSITWFLSWSPCGECSKAITEFLSQHPNVTLVIYVARLYHHMDQQNRQGLRDLVNSGVTIQIMTAPEYDYCWRNFVNYPPGKEAHWPRYPPLWMKLYALELHAGILGLPPCLNILRRKQPQLTFFTIALQSCHYQRLPPHILWATGLK

SEQ ID NO: 127 - protein, 228 aa, Artificial Sequence
  Description of Artificial Sequence: Synthetic polypeptide
SSETGPVAVDPTLRRRIEPHEFEVFFDPRELRKEACLLYEIKWGTSHKIWRNSGKNTTKHVEVNFIEKFTSERHFCPSISCSITWFLSWSPCWECSKAIREFLSQHPNVTLVIYVARLFQHMDQQNRQGLRDLVNSGVTIQIMTASEYDHCWRNFVNYPPGKEAHWPRYPPLWMKLYALELHAGILGLPPCLNILRRKQPQLTFFTIALQSCHYQRLPPHILWATGLK

SEQ ID NO: 128 - protein, 228 aa, Artificial Sequence
  Description of Artificial Sequence: Synthetic polypeptide
SSETGPVAVDPTLRRRIEPEFFNRNYDPRELRKETYLLYEIKWGKESKIWRHTSNNRTQHAEVNFLENFFNELYFNPSTHCSITWFLSWSPCGECSKAIVEFLKEHPNVNLEIYVARLYLCEDERNRQGLRDLVNSGVTIRIMNLPDYNYCWRTFVSHQGGDEDYWPRHFAPWVRLYVLELYCIILGLPPCLNILRRKQPQLTFFTIALQSCHYQRLPPHILWATGLK

SEQ ID NO: 129 - protein, 228 aa, Artificial Sequence
  Description of Artificial Sequence: Synthetic polypeptide
SSETGPVAVDPTLRRRIEPFYFQFNNDPRACRRKTYLCYELKQDGSTWVWKRTLHNKGRHAEICFLEKISSLEKLDPAQHYRITWYMSWSPCSNCAQKIVDFLKEHPHVNLRIYVARLYYHEEERYQEGLRNLRRSGVSIRVMDLPDFEHCWETFVDNGGGPFQPWPGLEELNSKQLSRRLQAGILGLPPCLNILRRKQPQLTFFTIALQSCHYQRLPPHILWATGLK

SEQ ID NO: 130 - protein, 228 aa, Artificial Sequence
  Description of Artificial Sequence: Synthetic polypeptide
SSETGPVAVDPTLRRRIEPFHFQFNNDPRAYRRKTYLCYELKQDGSTWVLDRTLRNKGRHAEICFLDKINSWERLDPAQHYRVTWYMSWSPCSNCAQQVVDFLKEHPHVNLRIFAARLYYHEQRRYQEGLRSLRGSGVPVAVMTLPDFEHCWETFVDHGGRPFQPWDGLEELNSRSLSRRLQAGILGLPPCLNILRRKQPQLTFFTIALQSCHYQRLPPHILWATGLK

SEQ ID NO: 131 - protein, 159 aa, Artificial Sequence
  Description of Artificial Sequence: Synthetic polypeptide
EFFNRNYDPRELRKETYLLYEIKWGKESKIWRHWCTSNNRTQHAEVNFLENFFNELYFNPSTHCSITWFLSWSPCGECSKAIVEFLKEHPNVNLEIYVARLYLCEDERNRQGLRDLVNSGVTIRIMNLPDYNYCWRTFVSHQGGDEDYWPRHFAPWVRL

SEQ ID NO: 132 - protein, 167 aa, Artificial Sequence
  Description of Artificial Sequence: Synthetic polypeptide
FHFQFNNDPRAYRRKTYLCYELKQDGSTWVLDRGCTLRNKGRHAEICFLDKINSWERLDPAQHYRVTWYMSWSPCSNCAQQVVDFLKEHPHVNLRIFAARLYYHEQRRYQEGLRSLRGSGVPVAVMTLPDFEHCWETFVDHGGRPFQPWDGLEELNSRSLSRRLQAG

SEQ ID NO: 133 - protein, 161 aa, Artificial Sequence
  Description of Artificial Sequence: Synthetic polypeptide
FERNYDPRELRKETYLLYEIKWGKSGKLWRHWCQNNRTQHAEVYFLENIFNARRFNPSTHCSITWYLSWSPCAECSQKIVDFLKEHPNVNLEIYVARLYYHEDERNRQGLRDLVNSGVTIRIMDLPDYNYCWKTFVSDQGGDEDYWPGHFAPWIKQYSLKL

SEQ ID NO: 134 - protein, 166 aa, Artificial Sequence
  Description of Artificial Sequence: Synthetic polypeptide
FYFQFNNDPRACRRKTYLCYELKQDGSTWVWKRGCTLHNKGRHAEICFLEKISSLEKLDPAQHYRITWYMSWSPCSNCAQKIVDFLKEHPHVNLRIYVARLYYHEEERYQEGLRNLRRSGVSIRVMDLPDFEHCWETFVDNGGGPFQPWPGLEENSKQLSRRLQAG

SEQ ID NO: 135 - protein, 165 aa, Artificial Sequence
  Description of Artificial Sequence: Synthetic polypeptide
FYEEFNNTLKSCRHKTLLCFSLKQDENTTLWKWGYAHNNGRHAEILVLREIENYEKLDPAAKYRITLYMSYSPCNDCADKIVDFLKKHPNVNLNIKVSRLYYHEDEKYQEGLRNLKQPGVSLKVMDRSDFEECFDLFVDPGGGEFQPWPGLEEKSKQYSATLQAG

SEQ ID NO: 136 - protein, 1774 aa, Artificial Sequence
  Description of Artificial Sequence: Synthetic polypeptide
MSEVEFSHEYWMRHALTLAKRAWDEREVPVGAVLVHNNRVIGEGWNRPIGRHDPTAHAEIMALRQGGLVMQNYRLIDATYVTLEPCVMCAGAMIHSRIGRVVFGARDAKTGAAGSLMDVLHHPGMNHRVEITEGILADECAALLSDFFRMRRQEIKAQKKAQSSTDSGGSSGGSSGSETPGTSESATPESSGGSSGGSSEVEFSHEYWMRHALTLAKRAWDEREVPVGAVLVLNNRVIGEGWNRSIGLHDPTAHAEIMALRQGGLVMQNYRLIDATLYVTFEPCVMCAGAMIHSRIGRVVFGVRNAKTGAAGSLMDVLHYPGMNHRVEITEGILADECAALLCYFFRMRRQVFNAQKKAQSSTDSGGSSGGSSGSETPGTSESATPESSGGSSGGSDKKYSIGLAIGTNSVGWAVITDEYKVPSKKFKVLGNTDRHSIKKNLIGALLFDSGETAEATRLKRTARRRYTRRKNRICYLQEIFSNEMAKVDDSFFHRLEESFLVEEDKKHERHPIFGNIVDEVAYHEKYPTIYHLRKKLVDSTDKADLRLIYLALAHMIKFRGHFLIEGDLNPDNSDVDKLFIQLVQTYNQLFEENPINASGVDAKAILSARLSKSRRLENLIAQLPGEKKNGLFGNLIALSLGLTPNFKSNFDLAEDAKLQLSKDTYDDDLDNLLAQIGDQYADLFLAAKNLSDAILLSDILRVNTEITKAPLSASMIKRYDEHHQDLTLLKALVRQQLPEKYKEIFFDQSKNGYAGYIDGGASQEEFYKFIKPILEKMDGTEELLVKLNREDLLRKQRTFDNGSIPHQIHLGELHAILRRQEDFYPFLKDNREKIEKILTFRIPYYVGPLARGNSRFAWMTRKSEETITPWNFEEVVDKGASAQSFIERMTNFDKNLPNEKVLPKHSLLYEYFTVYNELTKVKYVTEGMRKPAFLSGEQKKAIVDLLFKTNRKVTVKQLKEDYFKKIECFDSVEISGVEDRFNASLGTYHDLLKIIKDKDFLDNEENEDILEDIVLTLTLFEDREMIEERLKTYAHLFDDKVMKQLKRRRYTGWGRLSRKLINGIRDKQSGKTILDFLKSDGFANRNFMQLIHDDSLTFKEDIQKAQVSGQGDSLHEHIANLAGSPAIKKGILQTVKVVDELVKVMGRHKPENIVIEMARENQTTQKGQKNSRERMKRIEEGIKELGSQILKEHPVENTQLQNEKLYLYYLQNGRDMYVDQELDINRLSDYDVDHIVPQSFLKDDSIDNKVLTRSDKNRGKSDNVPSEEVVKKMKNYWRQLLNAKLITQRKFDNLTKAERGGLSELDKAGFIKRQLVETRQITKHVAQILDSRMNTKYDENDKLIREVKVITLKSKLVSDFRKDFQFYKVREINNYHHAHDAYLNAVVGTALIKKYPKLESEFVYGDYKVYDVRKMIAKSEQEIGKATAKYFFYSNIMNFFKTEITLANGEIRKRPLIETNGETGEIVWDKGRDFATVRKVLSMPQVNIVKKTEVQTGGFSKESILPKRNSDKLIARKKDWDPKKYGGFDSPTVAYSVLVVAKVEKGKSKKLKSVKELLGITIMERSSFEKNPIDFLEAKGYKEVKKDLIIKLPKYSLFELENGRKRMLASAGELQKGNELALPSKYVNFLYLASHYEKLKGSPEDNEQKQLFVEQHKHYLDEIIEQISEFSKRVILADANLDKVLSAYNKHRDKPIREQAENIIHLFTLTNLGAPAAFKYFDTTIDRKRYTSTKEVLDATLIHQSITGLYETRIDLSQLGGDSGGSPKKKRKV

SEQ ID NO: 137 - protein, 1775 aa, Artificial Sequence
  Description of Artificial Sequence: Synthetic polypeptide
MSEVEFSHEYWMRHALTLAKRAWDEREVPVGAVLVHNNRVIGEGWNRPIGRHDPTAHAEIMALRQGGLVMQNYRLIDATLYVTLEPCVMCAGAMIHSRIGRVVFGARDAKTGAAGSLMDVLHHPGMNHRVEITEGILADECAALLSDFFRMRRQEIKAQKKAQSSTDSGGSSGGSSGSETPGTSESATPESSGGSSGGSSEVEFSHEYWMRHALTLAKRALDEREVPVGAVLVLNNRVIGEGWNRAIGLHDPTAHAEIMALRQGGLVMQNYRLIDATLYVTFEPCVMCAGAMIHSRIGRVVFGVRNAKTGAAGSLMDVLHYPGMNHRVEITEGILADECNALLCYFFRMRRQVFNAQKKAQSSTDSGGSSGGSSGSETPGTSESATPESSGGSSGGSDKKYSIGLAIGTNSVGWAVITDEYKVPSKKFKVLGNTDRHSIKKNLIGALLFDSGETAEATRLKRTARRRYTRRKNRICYLQEIFSNEMAKVDDSFFHRLEESFLVEEDKKHERHPIFGNIVDEVAYHEKYPTIYHLRKKLVDSTDKADLRLIYLALAHMIKFRGHFLIEGDLNPDNSDVDKLFIQLVQTYNQLFEENPINASGVDAKAILSARLSKSRRLENLIAQLPGEKKNGLFGNLIALSLGLTPNFKSNFDLAEDAKLQLSKDTYDDDLDNLLAQIGDQYADLFLAAKNLSDAILLSDILRVNTEITKAPLSASMIKRYDEHHQDLTLLKALVRQQLPEKYKEIFFDQSKNGYAGYIDGGASQEEFYKFIKPILEKMDGTEELLVKLNREDLLRKQRTFDNGSIPHQIHLGELHAILRRQEDFYPFLKDNREKIEKILTFRIPYYVGPLARGNSRFAWMTRKSEETITPWNFEEVVDKGASAQSFIERMTNFDKNLPNEKVLPKHSLLYEYFTVYNELTKVKYVTEGMRKPAFLSGEQKKAIVDLLFKTNRKVTVKQLKEDYFKKIECFDSVEISGVEDRFNASLGTYHDLLKIIKDKDFLDNEENEDILEDIVLTLTLFEDREMIEERLKTYAHLFDDKVMKQLKRRRYTGWGRLSRKLINGIRDKQSGKTILDFLKSDGFANRNFMQLIHDDSLTFKEDIQKAQVSGQGDSLHEHIANLAGSPAIKKGILQTVKVVDELVKVMGRHKPENIVIEMARENQTTQKGQKNSRERMKRIEEGIKELGSQILKEHPVENTQLQNEKLYLYYLQNGRDMYVDQELDINRLSDYDVDHIVPQSFLKDDSIDNKVLTRSDKNRGKSDNVPSEEVVKKMKNYWRQLLNAKLITQRKFDNLTKAERGGLSELDKAGFIKRQLVETRQITKHVAQILDSRMNTKYDENDKLIREVKVITLKSKLVSDFRKDFQFYKVREINNYHHAHDAYLNAVVGTALIKKYPKLESEFVYGDYKVYDVRKMIAKSEQEIGKATAKYFFYSNIMNFFKTEITLANGEIRKRPLIETNGETGEIVWDKGRDFATVRKVLSMPQVNIVKKTEVQTGGFSKESILPKRNSDKLIARKKDWDPKKYGGFDSPTVAYSVLVVAKVEKGKSKKLKSVKELLGITIMERSSFEKNPIDFLEAKGYKEVKKDLIIKLPKYSLFELENGRKRMLASAGELQKGNELALPSKYVNFLYLASHYEKLKGSPEDNEQKQLFVEQHKHYLDEIIEQISEFSKRVILADANLDKVLSAYNKHRDKPIREQAENIIHLFTLTNLGAPAAFKYFDTTIDRKRYTSTKEVLDATLIHQSITGLYETRIDLSQLGGDSGGSPKKKRKV

SEQ ID NO: 138 - protein, 1775 aa, Artificial Sequence
  Description of Artificial Sequence: Synthetic polypeptide
MSEVEFSHEYWMRHALTLAKRAWDEREVPVGAVLVHNNRVIGEGWNRPIGRHDPTAHAEIMALRQGGLVMQNYRLIDATLYVTLEPCVMCAGAMIHSRIGRVVFGARDAKTGAAGSLMDVLHHPGMNHRVEITEGILADECAALLSDFFRMRRQEIKAQKKAQSSTDSGGSSGGSSGSETPGTSESATPESSGGSSGGSSEVEFSHEYWMRHALTLAKRALDEREVPVGAVLVLNNRVIGEGWNRAIGLHDPTAHAEIMALRQGGLVMQNYRLIDATLYVTFEPCVMCAGAMIHSRIGRVVFGVRNAKTGAAGSLMDVLHYPGMNHRVEITEGILADECNALLCYFFRMPRQVFNAQKKAQSSTDSGGSSGGSSGSETPGTSESATPESSGGSSGGSDKKYSIGLAIGTNSVGWAVITDEYKVPSKKFKVLGNTDRHSIKKNLIGALLFDSGETAEATRLKRTARRRYTRRKNRICYLQEIFSNEMAKVDDSFFHRLEESFLVEEDKKHERHPIFGNIVDEVAYHEKYPTIYHLRKKLVDSTDKADLRLIYLALAHMIKFRGHFLIEGDLNPDNSDVDKLFIQLVQTYNQLFEENPINASGVDAKAILSARLSKSRRLENLIAQLPGEKKNGLFGNLIALSLGLTPNFKSNFDLAEDAKLQLSKDTYDDDLDNLLAQIGDQYADLFLAAKNLSDAILLSDILRVNTEITKAPLSASMIKRYDEHHQDLTLLKALVRQQLPEKYKEIFFDQSKNGYAGYIDGGASQEEFYKFIKPILEKMDGTEELLVKLNREDLLRKQRTFDNGSIPHQIHLGELHAILRRQEDFYPFLKDNREKIEKILTFRIPYYVGPLARGNSRFAWMTRKSEETITPWNFEEVVDKGASAQSFIERMTNFDKNLPNEKVLPKHSLLYEYFTVYNELTKVKYVTEGMRKPAFLSGEQKKAIVDLLFKTNRKVTVKQLKEDYFKKIECFDSVEISGVEDRFNASLGTYHDLLKIIKDKDFLDNEENEDILEDIVLTLTLFEDREMIEERLKTYAHLFDDKVMKQLKRRRYTGWGRLSRKLINGIRDKQSGKTILDFLKSDGFANRNFMQLIHDDSLTFKEDIQKAQVSGQGDSLHEHIANLAGSPAIKKGILQTVKVVDELVKVMGRHKPENIVIEMARENQTTQKGQKNSRERMKRIEEGIKELGSQILKEHPVENTQLQNEKLYLYYLQNGRDMYVDQELDINRLSDYDVDHIVPQSFLKDDSIDNKVLTRSDKNRGKSDNVPSEEVVKKMKNYWRQLLNAKLITQRKFDNLTKAERGGLSELDKAGFIKRQLVETRQITKHVAQILDSRMNTKYDENDKLIREVKVITLKSKLVSDFRKDFQFYKVREINNYHHAHDAYLNAVVGTALIKKYPKLESEFVYGDYKVYDVRKMIAKSEQEIGKATAKYFFYSNIMNFFKTEITLANGEIRKRPLIETNGETGEIVWDKGRDFATVRKVLSMPQVNIVKKTEVQTGGFSKESILPKRNSDKLIARKKDWDPKKYGGFDSPTVAYSVLVVAKVEKGKSKKLKSVKELLGITIMERSSFEKNPIDFLEAKGYKEVKKDLIIKLPKYSLFELENGRKRMLASAGELQKGNELALPSKYVNFLYLASHYEKLKGSPEDNEQKQLFVEQHKHYLDEIIEQISEFSKRVILADANLDKVLSAYNKHRDKPIREQAENIIHLFTLTNLGAPAAFKYFDTTIDRKRYTSTKEVLDATLIHQSITGLYETRIDLSQLGGDSGGSPKKKRKV

SEQ ID NO: 139 - protein, 1775 aa, Artificial Sequence
  Description of Artificial Sequence: Synthetic polypeptide
MSEVEFSHEYWMRHALTLAKRAWDEREVPVGAVLVHNNRVIGEGWNRPIGRHDPTAHAEIMALRQGGLVMQNYRLIDATLYVTLEPCVMCAGAMIHSRIGRVVFGARDAKTGAAGSLMDVLHHPGMNHRVEITEGILADECAALLSDFFRMRRQEIKAQKKAQSSTDSGGSSGGSSGSETPGTSESATPESSGGSSGGSSEVEFSHEYWMRHALTLAKRARDEREVPVGAVLVLNNRVIGEGWNRAIGLHDPTAHAEIMALRQGGLVMQNYRLIDATLYVTFEPCVMCAGAMIHSRIGRVVFGVRNAKTGAAGSLMDVLHYPGMNHRVEITEGILADECAALLCYFFRMPRQVFNAQKKAQSSTDSGGSSGGSSGSETPGTSESATPESSGGSSGGSDKKYSIGLAIGTNSVGWAVITDEYKVPSKKFKVLGNTDRHSIKKNLIGALLFDSGETAEATRLKRTARRRYTRRKNRICYLQEIFSNEMAKVDDSFFHRLEESFLVEEDKKHERHPIFGNIVDEVAYHEKYPTIYHLRKKLVDSTDKADLRLIYLALAHMIKFRGHFLIEGDLNPDNSDVDKLFIQLVQTYNQLFEENPINASGVDAKAILSARLSKSRRLENLIAQLPGEKKNGLFGNLIALSLGLTPNFKSNFDLAEDAKLQLSKDTYDDDLDNLLAQIGDQYADLFLAAKNLSDAILLSDILRVNTEITKAPLSASMIKRYDEHHQDLTLLKALVRQQLPEKYKEIFFDQSKNGYAGYIDGGASQEEFYKFIKPILEKMDGTEELLVKLNREDLLRKQRTFDNGSIPHQIHLGELHAILRRQEDFYPFLKDNREKIEKILTFRIPYYVGPLARGNSRFAWMTRKSEETITPWNFEEVVDKGASAQSFIERMTNFDKNLPNEKVLPKHSLLYEYFTVYNELTKVKYVTEGMRKPAFLSGEQKKAIVDLLFKTNRKVTVKQLKEDYFKKIECFDSVEISGVEDRFNASLGTYHDLLKIIKDKDFLDNEENEDILEDIVLTLTLFEDREMIEERLKTYAHLFDDKVMKQLKRRRYTGWGRLSRKLINGIRDKQSGKTILDFLKSDGFANRNFMQLIHDDSLTFKEDIQKAQVSGQGDSLHEHIANLAGSPAIKKGILQTVKVVDELVKVMGRHKPENIVIEMARENQTTQKGQKNSRERMKRIEEGIKELGSQILKEHPVENTQLQNEKLYLYYLQNGRDMYVDQELDINRLSDYDVDHIVPQSFLKDDSIDNKVLTRSDKNRGKSDNVPSEEVVKKMKNYWRQLLNAKLITQRKFDNLTKAERGGLSELDKAGFIKRQLVETRQITKHVAQILDSRMNTKYDENDKLIREVKVITLKSKLVSDFRKDFQFYKVREINNYHHAHDAYLNAVVGTALIKKYPKLESEFVYGDYKVYDVRKMIAKSEQEIGKATAKYFFYSNIMNFFKTEITLANGEIRKRPLIETNGETGEIVWDKGRDFATVRKVLSMPQVNIVKKTEVQTGGFSKESILPKRNSDKLIARKKDWDPKKYGGFDSPTVAYSVLVVAKVEKGKSKKLKSVKELLGITIMERSSFEKNPIDFLEAKGYKEVKKDLIIKLPKYSLFELENGRKRMLASAGELQKGNELALPSKYVNFLYLASHYEKLKGSPEDNEQKQLFVEQHKHYLDEIIEQISEFSKRVILADANLDKVLSAYNKHRDKPIREQAENIIHLFTLTNLGAPAAFKYFDTTIDRKRYTSTKEVLDATLIHQSITGLYETRIDLSQLGGDSGGSPKKKRKV

SEQ ID NO: 140 - protein, 2301 aa, Artificial Sequence
  Description of Artificial Sequence: Synthetic polypeptide
MKRTADGSEFESPKKKRKVSEVEFSHEYWMRHALTLAKRARDEREVPVGAVLVLNNRVIGEGWNRAIGLHDPTAHAEIMALRQGGLVMQNYRLIDATLYGTFEPCVMCAGAMIHSRIGRVVFGVRNAKTGAAGSLMDVLHYPGMNHRVEITEGILADECAALLCYFFRMPRQVFNAQKKAQSSTDSGGSSGGSSGSETPGTSESATPESSGGSSGGSDKKYSIGLAIGTNSVGWAVITDEYKVPSKKFKVLGNTDRHSIKKNLIGALLFDSGETAEATRLKRTARRRYTRRKNRICYLQEIFSNEMAKVDDSFFHRLEESFLVEEDKKHERHPIFGNIVDEVAYHEKYPTIYHLRKKLVDSTDKADLRLIYLALAHMIKFRGHFLIEGDLNPDNSDVDKLFIQLVQTYNQLFEENPINASGVDAKAILSARLSKSRRLENLIAQLPGEKKNGLFGNLIALSLGLTPNFKSNFDLAEDAKLQLSKDTYDDDLDNLLAQIGDQYADLFLAAKNLSDAILLSDILRVNTEITKAPLSASMIKRYDEHHQDLTLLKALVRQQLPEKYKEIFFDQSKNGYAGYIDGGASQEEFYKFIKPILEKMDGTEELLVKLNREDLLRKQRTFDNGSIPHQIHLGELHAILRRQEDFYPFLKDNREKIEKILTFRIPYYVGPLARGNSRFAWMTRKSEETITPWNFEEVVDKGASAQSFIERMTNFDKNLPNEKVLPKHSLLYEYFTVYNELTKVKYVTEGMRKPAFLSGEQKKAIVDLLFKTNRKVTVKQLKEDYFKKIECFDSVEISGVEDRFNASLGTYHDLLKIIKDKDFLDNEENEDILEDIVLTLTLFEDREMIEERLKTYAHLFDDKVMKQLKRRRYTGWGRLSRKLINGIRDKQSGKTILDFLKSDGFANRNFMQLIHDDSLTFKEDIQKAQVSGQGDSLHEHIANLAGSPAIKKGILQTVKVVDELVKVMGRHKPENIVIEMARENQTTQKGQKNSRERMKRIEEGIKELGSQILKEHPVENTQLQNEKLYLYYLQNGRDMYVDQELDINRLSDYDVDHIVPQSFLKDDSIDNKVLTRSDKNRGKSDNVPSEEVVKKMKNYWRQLLNAKLITQRKFDNLTKAERGGLSELDKAGFIKRQLVETRQITKHVAQILDSRMNTKYDENDKLIREVKVITLKSKLVSDFRKDFQFYKVREINNYHHAHDAYLNAVVGTALIKKYPKLESEFVYGDYKVYDVRKMIAKSEQEIGKATAKYFFYSNIMNFFKTEITLANGEIRKRPLIETNGETGEIVWDKGRDFATVRKVLSMPQVNIVKKTEVQTGGFSKESILPKRNSDKLIARKKDWDPKKYGGFDSPTVAYSVLVVAKVEKGKSKKLKSVKELLGITIMERSSFEKNPIDFLEAKGYKEVKKDLIIKLPKYSLFELENGRKRMLASAGELQKGNELALPSKYVNFLYLASHYEKLKGSPEDNEQKQLFVEQHKHYLDEIIEQISEFSKRVILADANLDKVLSAYNKHRDKPIREQAENIIHLFTLTNLGAPAAFKYFDTTIDRKRYTSTKEVLDATLIHQSITGLYETRIDLSQLGGDSGGSKRTADGSEFEPKKKRKVSGGSSGGSSGSETPGTSESATPESSGGSSGGSTDAEYVRIHEKLDIYTFKKQFFNNKKSVSHRCYVLFELKRRGERRACFWGYAVNKPQSGTERGIHAEIFSIRKVEEYLRDNPGQFTINWYSSWSPCADCAEKILEWYNQELRGNGHTLKIWACKLYYEKNARNQIGLWNLRDNGVGLNVMVSEHYQCCRKIFIQSSHNQLNENRWLEKTLKRAEKWRSELSIMIQVKILHTTKSPAVSGGSGGSGGSTNLSDIIEKETGKQLVIQESILMLPEEVEEVIGNKPESDILVHTAYDESTDENVMLLTSDAPEYKPWALVIQDSNGENKIKMLSGGSGGSGGSTNLSDIIEKETGKQLVIQESILMLPEEVEEVIGNKPESDILVHTAYDESTDENVMLLTSDAPEYKPWALVIQDSNGENKIKMLGSGATNFSLLKQAGDVEENPGPMVSKGEELFTGVVPILVELDGDVNGHKFSVSGEGEGDATYGKLTLKFICTTGKLPVPWPTLVTTLTYGVQCFSRYPDHMKQHDFFKSAMPEGYVQERTIFFKDDGNYKTRAEVKFEGDTLVNRIELKGIDFKEDGNILGHKLEYNYNSHNVYIMADKQKNGIKVNFKIRHNIEDGSVQLADHYQQNTPIGDGPVLLPDNHYLSTQSALSKDPNEKRDHMVLLEFVTAAGITLGMDELYKSGGSPKKKRK

SEQ ID NO: 141 - protein, 2116 aa, Artificial Sequence
  Description of Artificial Sequence: Synthetic polypeptide
MKRTADGSEFESPKKKRKVSEVEFSHEYWMRHALTLAKRARDEREVPVGAVLVLNNRVIGEGWNRAIGLHDPTAHAEIMALRQGGLVMQNYRLIDATLYGTFEPCVMCAGAMIHSRIGRVVFGVRNAKTGAAGSLMDVLHYPGMNHRVEITEGILADECAALLCYFFRMPRQVFNAQKKAQSSTDSGGSSGGSSGSETPGTSESATPESSGGSSGGSDKKYSIGLAIGTNSVGWAVITDEYKVPSKKFKVLGNTDRHSIKKNLIGALLFDSGETAEATRLKRTARRRYTRRKNRICYLQEIFSNEMAKVDDSFFHRLEESFLVEEDKKHERHPIFGNIVDEVAYHEKYPTIYHLRKKLVDSTDKADLRLIYLALAHMIKFRGHFLIEGDLNPDNSDVDKLFIQLVQTYNQLFEENPINASGVDAKAILSARLSKSRRLENLIAQLPGEKKNGLFGNLIALSLGLTPNFKSNFDLAEDAKLQLSKDTYDDDLDNLLAQIGDQYADLFLAAKNLSDAILLSDILRVNTEITKAPLSASMIKRYDEHHQDLTLLKALVRQQLPEKYKEIFFDQSKNGYAGYIDGGASQEEFYKFIKPILEKMDGTEELLVKLNREDLLRKQRTFDNGSIPHQIHLGELHAILRRQEDFYPFLKDNREKIEKILTFRIPYYVGPLARGNSRFAWMTRKSEETITPWNFEEVVDKGASAQSFIERMTNFDKNLPNEKVLPKHSLLYEYFTVYNELTKVKYVTEGMRKPAFLSGEQKKAIVDLLFKTNRKVTVKQLKEDYFKKIECFDSVEISGVEDRFNASLGTYHDLLKIIKDKDFLDNEENEDILEDIVLTLTLFEDREMIEERLKTYAHLFDDKVMKQLKRRRYTGWGRLSRKLINGIRDKQSGKTILDFLKSDGFANRNFMQLIHDDSLTFKEDIQKAQVSGQGDSLHEHIANLAGSPAIKKGILQTVKVVDELVKVMGRHKPENIVIEMARENQTTQKGQKNSRERMKRIEEGIKELGSQILKEHPVENTQLQNEKLYLYYLQNGRDMYVDQELDINRLSDYDVDHIVPQSFLKDDSIDNKVLTRSDKNRGKSDNVPSEEVVKKMKNYWRQLLNAKLITQRKFDNLTKAERGGLSELDKAGFIKRQLVETRQITKHVAQILDSRMNTKYDENDKLIREVKVITLKSKLVSDFRKDFQFYKVREINNYHHAHDAYLNAVVGTALIKKYPKLESEFVYGDYKVYDVRKMIAKSEQEIGKATAKYFFYSNIMNFFKTEITLANGEIRKRPLIETNGETGEIVWDKGRDFATVRKVLSMPQVNIVKKTEVQTGGFSKESILPKRNSDKLIARKKDWDPKKYGGFDSPTVAYSVLVVAKVEKGKSKKLKSVKELLGITIMERSSFEKNPIDFLEAKGYKEVKKDLIIKLPKYSLFELENGRKRMLASAGELQKGNELALPSKYVNFLYLASHYEKLKGSPEDNEQKQLFVEQHKHYLDEIIEQISEFSKRVILADANLDKVLSAYNKHRDKPIREQAENIIHLFTLTNLGAPAAFKYFDTTIDRKRYTSTKEVLDATLIHQSITGLYETRIDLSQLGGDSGGSKRTADGSEFEPKKKRKVSGGSSGGSSGSETPGTSESATPESSGGSSGGSTDAEYVRIHEKLDIYTFKKQFFNNKKSVSHRCYVLFELKRRGERRACFWGYAVNKPQSGTERGIHAEIFSIRKVEEYLRDNPGQFTINWYSSWSPCADCAEKILEWYNQELRGNGHTLKIWACKLYYEKNARNQIGLWNLRDNGVGLNVMVSEHYQCCRKIFIQSSHNQLNENRWLEKTLKRAEKWRSELSIMIQVKILHTTKSPAVGSGATNFSLLKQAGDVEENPGPMVSKGEELFTGVVPILVELDGDVNGHKFSVSGEGEGDATYGKLTLKFICTTGKLPVPWPTLVTTLTYGVQCFSRYPDHMKQHDFFKSAMPEGYVQERTIFFKDDGNYKTRAEVKFEGDTLVNRIELKGIDFKEDGNILGHKLEYNYNSHNVYIMADKQKNGIKVNFKIRHNIEDGSVQLADHYQQNTPIGDGPVLLPDNHYLSTQSALSKDPNEKRDHMVLLEFVTAAGITLGMDELYKSGGSPKKKRKV

SEQ ID NO: 142 - protein, 2302 aa, Artificial Sequence
  Description of Artificial Sequence: Synthetic polypeptide
MKRTADGSEFESPKKKRKVSEVEFSHEYWMRHALTLAKRARDEREVPVGAVLVLNNRVIGEGWNRAIGLHDPTAHAEIMALRQGGLVMQNYRLIDATLYGTFEPCVMCAGAMIHSRIGRVVFGVRNAKTGAAGSLMDVLHYPGMNHRVEITEGILADECAALLCYFFRMPRQVFNAQKKAQSSTDSGGSSGGSSGSETPGTSESATPESSGGSSGGSDKKYSIGLAIGTNSVGWAVITDEYKVPSKKFKVLGNTDRHSIKKNLIGALLFDSGETAEATRLKRTARRRYTRRKNRICYLQEIFSNEMAKVDDSFFHRLEESFLVEEDKKHERHPIFGNIVDEVAYHEKYPTIYHLRKKLVDSTDKADLRLIYLALAHMIKFRGHFLIEGDLNPDNSDVDKLFIQLVQTYNQLFEENPINASGVDAKAILSARLSKSRRLENLIAQLPGEKKNGLFGNLIALSLGLTPNFKSNFDLAEDAKLQLSKDTYDDDLDNLLAQIGDQYADLFLAAKNLSDAILLSDILRVNTEITKAPLSASMIKRYDEHHQDLTLLKALVRQQLPEKYKEIFFDQSKNGYAGYIDGGASQEEFYKFIKPILEKMDGTEELLVKLNREDLLRKQRTFDNGSIPHQIHLGELHAILRRQEDFYPFLKDNREKIEKILTFRIPYYVGPLARGNSRFAWMTRKSEETITPWNFEEVVDKGASAQSFIERMTNFDKNLPNEKVLPKHSLLYEYFTVYNELTKVKYVTEGMRKPAFLSGEQKKAIVDLLFKTNRKVTVKQLKEDYFKKIECFDSVEISGVEDRFNASLGTYHDLLKIIKDKDFLDNEENEDILEDIVLTLTLFEDREMIEERLKTYAHLFDDKVMKQLKRRRYTGWGRLSRKLINGIRDKQSGKTILDFLKSDGFANRNFMQLIHDDSLTFKEDIQKAQVSGQGDSLHEHIANLAGSPAIKKGILQTVKVVDELVKVMGRHKPENIVIEMARENQTTQKGQKNSRERMKRIEEGIKELGSQILKEHPVENTQLQNEKLYLYYLQNGRDMYVDQELDINRLSDYDVDHIVPQSFLKDDSIDNKVLTRSDKNRGKSDNVPSEEVVKKMKNYWRQLLNAKLITQRKFDNLTKAERGGLSELDKAGFIKRQLVETRQITKHVAQILDSRMNTKYDENDKLIREVKVITLKSKLVSDFRKDFQFYKVREINNYHHAHDAYLNAVVGTALIKKYPKLESEFVYGDYKVYDVRKMIAKSEQEIGKATAKYFFYSNIMNFFKTEITLANGEIRKRPLIETNGETGEIVWDKGRDFATVRKVLSMPQVNIVKKTEVQTGGFSKESIRPKRNSDKLIARKKDWDPKKYGGFVSPTVAYSVLVVAKVEKGKSKKLKSVKELLGITIMERSSFEKNPIDFLEAKGYKEVKKDLIIKLPKYSLFELENGRKRMLASARFLQKGNELALPSKYVNFLYLASHYEKLKGSPEDNEQKQLFVEQHKHYLDEIIEQISEFSKRVILADANLDKVLSAYNKHRDKPIREQAENIIHLFTLTNLGAPRAFKYFDTTIDRKVYRSTKEVLDATLIHQSITGLYETRIDLSQLGGDSGGSKRTADGSEFEPKKKRKVSGGSSGGSSGSETPGTSESATPESSGGSSGGSTDAEYVRIHEKLDIYTFKKQFFNNKKSVSHRCYVLFELKRRGERRACFWGYAVNKPQSGTERGIHAEIFSIRKVEEYLRDNPGQFTINWYSSWSPCADCAEKILEWYNQELRGNGHTLKIWACKLYYEKNARNQIGLWNLRDNGVGLNVMVSEHYQCCRKIFIQSSHNQLNENRWLEKTLKRAEKWRSELSIMIQVKILHTTKSPAVSGGSGGSGGSTNLSDIIEKETGKQLVIQESILMLPEEVEEVIGNKPESDILVHTAYDESTDENVMLLTSDAPEYKPWALVIQDSNGENKIKMLSGGSGGSGGSTNLSDIIEKETGKQLVIQESILMLPEEVEEVIGNKPESDILVHTAYDESTDENVMLLTSDAPEYKPWALVIQDSNGENKIKMLGSGATNFSLLKQAGDVEENPGPMVSKGEELFTGVVPILVELDGDVNGHKFSVSGEGEGDATYGKLTLKFICTTGKLPVPWPTLVTTLTYGVQCFSRYPDHMKQHDFFKSAMPEGYVQERTIFFKDDGNYKTRAEVKFEGDTLVNRIELKGIDFKEDGNILGHKLEYNYNSHNVYIMADKQKNGIKVNFKIRHNIEDGSVQLADHYQQNTPIGDGPVLLPDNHYLSTQSALSKDPNEKRDHMVLLEFVTAAGITLGMDELYKSGGSPKKKRKV

SEQ ID NO: 143 - protein, 2302 aa, Artificial Sequence
  Description of Artificial Sequence: Synthetic polypeptide
MKRTADGSEFESPKKKRKVSEVEFSHEYWMRHALTLAKRARDEREVPVGAVLVLNNRVIGEGWNRAIGLHDPTAHAEIMALRQGGLVMQNYRLIDATLYGTFEPCVMCAGAMIHSRIGRVVFGVRNAKTGAAGSLMDVLHYPGMNHRVEITEGILADECAALLCYFFRMPRQVFNAQKKAQSSTDSGGSSGGSSGSETPGTSESATPESSGGSSGGSDKKYSIGLAIGTNSVGWAVITDEYKVPSKKFKVLGNTDRHSIKKNLIGALLFDSGETAEATRLKRTARRRYTRRKNRICYLQEIFSNEMAKVDDSFFHRLEESFLVEEDKKHERHPIFGNIVDEVAYHEKYPTIYHLRKKLVDSTDKADLRLIYLALAHMIKFRGHFLIEGDLNPDNSDVDKLFIQLVQTYNQLFEENPINASGVDAKAILSARLSKSRRLENLIAQLPGEKKNGLFGNLIALSLGLTPNFKSNFDLAEDAKLQLSKDTYDDDLDNLLAQIGDQYADLFLAAKNLSDAILLSDILRVNTEITKAPLSASMIKRYDEHHQDLTLLKALVRQQLPEKYKEIFFDQSKNGYAGYIDGGASQEEFYKFIKPILEKMDGTEELLVKLNREDLLRKQRTFDNGSIPHQIHLGELHAILRRQEDFYPFLKDNREKIEKILTFRIPYYVGPLARGNSRFAWMTRKSEETITPWNFEEVVDKGASAQSFIERMTNFDKNLPNEKVLPKHSLLYEYFTVYNELTKVKYVTEGMRKPAFLSGEQKKAIVDLLFKTNRKVTVKQLKEDYFKKIECFDSVEISGVEDRFNASLGTYHDLLKIIKDKDFLDNEENEDILEDIVLTLTLFEDREMIEERLKTYAHLFDDKVMKQLKRRRYTGWGRLSRKLINGIRDKQSGKTILDFLKSDGFANRNFMQLIHDDSLTFKEDIQKAQVSGQGDSLHEHIANLAGSPAIKKGILQTVKVVDELVKVMGRHKPENIVIEMARENQTTQKGQKNSRERMKRIEEGIKELGSQILKEHPVENTQLQNEKLYLYYLQNGRDMYVDQELDINRLSDYDVDHIVPQSFLKDDSIDNKVLTRSDKNRGKSDNVPSEEVVKKMKNYWRQLLNAKLITQRKFDNLTKAERGGLSELDKAGFIKRQLVETRQITKHVAQILDSRMNTKYDENDKLIREVKVITLKSKLVSDFRKDFQFYKVREINNYHHAHDAYLNAVVGTALIKKYPKLESEFVYGDYKVYDVRKMIAKSEQEIGKATAKYFFYSNIMNFFKTEITLANGEIRKRPLIETNGETGEIVWDKGRDFATVRKVLSMPQVNIVKKTEVQTGGFSKESILPKRNSDKLIARKKDWDPKKYGGFVSPTVAYSVLVVAKVEKGKSKKLKSVKELLGITIMERSSFEKNPIDFLEAKGYKEVKKDLIIKLPKYSLFELENGRKRMLASARELQKGNELALPSKYVNFLYLASHYEKLKGSPEDNEQKQLFVEQHKHYLDEIIEQISEFSKRVILADANLDKVLSAYNKHRDKPIREQAENIIHLFTLTNLGAPAAFKYFDTTIDRKQYRSTKEVLDATLIHQSITGLYETRIDLSQLGGDSGGSKRTADGSEFEPKKKRKVSGGSSGGSSGSETPGTSESATPESSGGSSGGSTDAEYVRIHEKLDIYTFKKQFFNNKKSVSHRCYVLFELKRRGERRACFWGYAVNKPQSGTERGIHAEIFSIRKVEEYLRDNPGQFTINWYSSWSPCADCAEKILEWYNQELRGNGHTLKIWACKLYYEKNARNQIGLWNLRDNGVGLNVMVSEHYQCCRKIFIQSSHNQLNENRWLEKTLKRAEKWRSELSIMIQVKILHTTKSPAVSGGSGGSGGSTNLSDIIEKETGKQLVIQESILMLPEEVEEVIGNKPESDILVHTAYDESTDENVMLLTSDAPEYKPWALVIQDSNGENKIKMLSGGSGGSGGSTNLSDIIEKETGKQLVIQESILMLPEEVEEVIGNKPESDILVHTAYDESTDENVMLLTSDAPEYKPWALVIQDSNGENKIKMLGSGATNFSLLKQAGDVEENPGPMVSKGEELFTGVVPILVELDGDVNGHKFSVSGEGEGDATYGKLTLKFICTTGKLPVPWPTLVTTLTYGVQCFSRYPDHMKQHDFFKSAMPEGYVQERTIFFKDDGNYKTRAEVKFEGDTLVNRIELKGIDFKEDGNILGHKLEYNYNSHNVYIMADKQKNGIKVNFKIRHNIEDGSVQLADHYQQNTPIGDGPVLLPDNHYLSTQSALSKDPNEKRDHMVLLEFVTAAGITLGMDELYKSGGSPKKKRKV

SEQ ID NO: 144 - protein, 2294 aa, Artificial Sequence
  Description of Artificial Sequence: Synthetic polypeptide
MKRTADGSEFESPKKKRKVSEVEFSHEYWMRHALTLAKRARDEREVPVGAVLVLNNRVIGEGWNRAIGLHDPTAHAEIMALRQGGLVMQNYRLIDATLYGTFEPCVMCAGAMIHSRIGRVVFGVRNAKTGAAGSLMDVLHYPGMNHRVEITEGILADECAALLCYFFRMPRQVFNAQKKAQSSTDSGGSSGGSSGSETPGTSESATPESSGGSSGGSDKKYSIGLAIGTNSVGWAVITDEYKVPSKKFKVLGNTDRHSIKKNLIGALLFDSGETAEATRLKRTARRRYTRRKNRICYLQEIFSNEMAKVDDSFFHRLEESFLVEEDKKHERHPIFGNIVDEVAYHEKYPTIYHLRKKLVDSTDKADLRLIYLALAHMIKFRGHFLIEGDLNPDNSDVDKLFIQLVQTYNQLFEENPINASGVDAKAILSARLSKSRRLENLIAQLPGEKKNGLFGNLIALSLGLTPNFKSNFDLAEDAKLQLSKDTYDDDLDNLLAQIGDQYADLFLAAKNLSDAILLSDILRVNTEITKAPLSASMIKRYDEHHQDLTLLKALVRQQLPEKYKEIFFDQSKNGYAGYIDGGASQEEFYKFIKPILEKMDGTEELLVKLNREDLLRKQRTFDNGSIPHQIHLGELHAILRRQEDFYPFLKDNREKIEKILTFRIPYYVGPLARGNSRFAWMTRKSEETITPWNFEEVVDKGASAQSFIERMTNFDKNLPNEKVLPKHSLLYEYFTVYNELTKVKYVTEGMRKPAFLSGEQKKAIVDLLFKTNRKVTVKQLKEDYFKKIECFDSVEISGVEDRFNASLGTYHDLLKIIKDKDFLDNEENEDILEDIVLTLTLFEDREMIEERLKTYAHLFDDKVMKQLKRRRYTGWGRLSRKLINGIRDKQSGKTILDFLKSDGFANRNFMQLIHDDSLTFKEDIQKAQVSGQGDSLHEHIANLAGSPAIKKGILQTVKVVDELVKVMGRHKPENIVIEMARENQTTQKGQKNSRERMKRIEEGIKELGSQILKEHPVENTQLQNEKLYLYYLQNGRDMYVDQELDINRLSDYDVDHIVPQSFLKDDSIDNKVLTRSDKNRGKSDNVPSEEVVKKMKNYWRQLLNAKLITQRKFDNLTKAERGGLSELDKAGFIKRQLVETRQITKHVAQILDSRMNTKYDENDKLIREVKVITLKSKLVSDFRKDFQFYKVREINNYHHAHDAYLNAVVGTALIKKYPKLESEFVYGDYKVYDVRKMIAKSEQEIGKATAKYFFYSNIMNFFKTEITLANGEIRKRPLIETNGETGEIVWDKGRDFATVRKVLSMPQVNIVKKTEIQTVGQNGGLFDDNPKSPLEVTPSKLVPLKKELNPKKYGGYQKPTTAYPVLLITDTKQLIPISVMNKKQFEQNPVKFLRDRGYQQVGKNDFIKLPKYTLVDIGDGIKRLWASSKEIHKGNQLVVSKKSQILLYHAHHLDSDLSNDYLQNHNQQFDVLFNEIISFSKKCKLGKEHIQKIENVYSNKKNSASIEELAESFIKLLGFTQLGATSPFNFLGVKLNQKQYKGKKDYILPCTEGTLIRQSITGLYETRVDLSKIGEDSGGSKRTADGSEFEPKKKRKVSGGSSGGSSGSETPGTSESATPESSGGSSGGSTDAEYVRIHEKLDIYTFKKQFFNNKKSVSHRCYVLFELKRRGERRACFWGYAVNKPQSGTERGIHAEIFSIRKVEEYLRDNPGQFTINWYSSWSPCADCAEKILEWYNQELRGNGHTLKIWACKLYYEKNARNQIGLWNLRDNGVGLNVMVSEHYQCCRKIFIQSSHNQLNENRWLEKTLKRAEKWRSELSIMIQVKILHTTKSPAVSGGSGGSGGSTNLSDIIEKETGKQLVIQESILMLPEEVEEVIGNKPESDILVHTAYDESTDENVMLLTSDAPEYKPWALVIQDSNGENKIKMLSGGSGGSGGSTNLSDIIEKETGKQLVIQESILMLPEEVEEVIGNKPESDILVHTAYDESTDENVMLLTSDAPEYKPWALVIQDSNGENKIKMLGSGATNFSLLKQAGDVEENPGPMVSKGEELFTGVVPILVELDGDVNGHKFSVSGEGEGDATYGKLTLKFICTTGKLPVPWPTLVTTLTYGVQCFSRYPDHMKQHDFFKSAMPEGYVQERTIFFKDDGNYKTRAEVKFEGDTLVNRIELKGIDFKEDGNILGHKLEYNYNSHNVYIMADKQKNGIKVNFKIRHNIEDGSVQLADHYQQNTPIGDGPVLLPDNHYLSTQSALSKDPNEKRDHMVLLEFVTAAGITLGMDELYKSGGSPKKKRKV

SEQ ID NO: 145 - protein, 166 aa, Artificial Sequence
  Description of Artificial Sequence: Synthetic polypeptide
SEVEFSHEYWMRHALTLAKRARDEREVPVGAVLVLNNRVIGEGWNRAIGLHDPTAHAEIMALRQGGLVMQNYRLIDATLYVTFEPCVMCAGAMIHSRIGRVVFGVRNSKRGAAGSLMNVLNYPGMNHRVEITEGILADECAALLCDFYRMPRQVFNAQKKAQSSIN

SEQ ID NO: 146 - protein, 166 aa, Artificial Sequence
  Description of Artificial Sequence: Synthetic polypeptide
SEVEFSHEYWMRHALTLAKRARDEREVPVGAVLVLNNRVIGEGWNRAIGLHDPTAHAEIMALRQGGLVMQNYRLIDATLYGTFEPCVMCAGAMIHSRIGRVVFGVRNSKRGAAGSLMNVLNYPGMNHRVEITEGILADECAALLCDFYRMPRQVFNAQKKAQSSIN

SEQ ID NO: 147 - protein, 166 aa, Artificial Sequence
  Description of Artificial Sequence: Synthetic polypeptide
SEVEFSHEYWMRHALTLAAAARDEREVPVGAVLVLNNRVIGEGWNRAIGLHDPTAHAEIMALRQGGLVMQNYRLIDATLYVTFEPCVMCAGAMIHSRIGRVVFGVRNSKRGAAGSLMNVLNYPGMNHRVEITEGILADECAALLCDFYRMPRQVFNAQKKAQSSIN

SEQ ID NO: 148 - protein, 166 aa, Artificial Sequence
  Description of Artificial Sequence: Synthetic polypeptide
SEVEFSHEYWMRHALTLAKRARDEREVPVGAVLVLNNRVIGEGWNRAIGLHDPTAHAEIMALRQGGLVMQNYRLIDATLYVTFEPCVMCAGAMIHSRIGRVVFGVRNAKTGAAGSLMDVLHHPGMNHRVEITEGILADECAALLCRFFRMPRRVFNAQKKAQSSTD

SEQ ID NO: 149 - protein, 166 aa, Artificial Sequence
  Description of Artificial Sequence: Synthetic polypeptide
SEVEFSHEYWMRHALTLAKRARDEREVPVGAVLVLNNRVIGEGWNRAIGLHDPTAHAEIMALRQGGLVMQNYRLYDATLYVTFEPCVMCAGAMIHSRIGRVVFGVRNAKTGAAGSLMDVLHHPGMNHRVEITEGILADECAALLCRFFRMPRRVFNAQKKAQSSTD

SEQ ID NO: 150 - protein, 166 aa, Artificial Sequence
  Description of Artificial Sequence: Synthetic polypeptide
SEVEFSHEYWMRHALTLAKRARDEREVPVGAVLVLNNRVIGEGWNRAIGLHDPTAHAEIMALRQGGLVMQNYRLIDATLYSTFEPCVMCAGAMIHSRIGRVVFGVRNAKTGAAGSLMDVLHYPGMNHRVEITEGILADECAALLCYFFRMPRRVFNAQKKAQSSTD

SEQ ID NO: 151 - protein, 166 aa, Artificial Sequence
  Description of Artificial Sequence: Synthetic polypeptide
SEVEFSHEYWMRHALTLAKRARDEREVPVGAVLVLNNRVIGEGWNRAIGLHDPTAHAEIMALRQGGLVMQNYRLYDATLYSTFEPCVMCAGAMIHSRIGRVVFGVRNAKTGAAGSLMDVLHHPGMNHRVEITEGILADECAALLCRFFRMPRRVFNAQKKAQSSTD

SEQ ID NO: 152 - protein, 161 aa, Artificial Sequence; identical to SEQ ID NO: 133
  Description of Artificial Sequence: Synthetic polypeptide

SEQ ID NO: 153 - protein, 161 aa, Artificial Sequence
  Description of Artificial Sequence: Synthetic polypeptide
FERNYDPRELRKETYLLYEIKWGKSGKLWRHWCQNNRTQHAEVYFLENIFNARRFNPSTHCSITWYLSWSPCAECSQKIVDFLKEHPNVNLEIYVARLYYPENERNRQGLRDLVNSGVTIRIMDLPDYNYCWKTFVSDQGGDEDYWPGHFAPWIKQYSLKL

SEQ ID NO: 154 - protein, 228 aa, Artificial Sequence
  Description of Artificial Sequence: Synthetic polypeptide
SSETGPVAVDPTLRRRIEPHEFEVFFDPRELRKETCLLYEINWGGRHSIWRHTSQNTNKHVEVNFIEKFTTERYFCPNTRCSITWFLSYSPCGECSRAITEFLSRYPHVTLFIYIARLYHHADPENRQGLRDLISSGVTIQIMTEQESGYCWRNFVNYSPSNEAHWPRYPHLWVRLYVLELYCIILGLPPCLNILRRKQPQLTFFTIALQSCHYQRLPPHILWATGLK

SEQ ID NO: 155 - protein, 228 aa, Artificial Sequence
  Description of Artificial Sequence: Synthetic polypeptide
SSETGPVAVDPTLRRRIEPHEFEVFFDPRELRKETCLLYEINWGGRHSIWRHTSQNTNKHVEVNFIEKFTTERYFCPNTRCSITWFLSYSPCGECSRAITEFLSRYPHVTLFIYIARLYHHADPRNRQGLEDLISSGVTIQIMTEQESGYCWRNFVNYSPSNEAHWPRYPHLWVRLYVLELYCIILGLPPCLNILRRKQPQLTFFTIALQSCHYQRLPPHILWATGLK

SEQ ID NO: 156 - protein, 228 aa, Artificial Sequence
  Description of Artificial Sequence: Synthetic polypeptide
SSETGPVAVDPTLRRRIEPHEFEVFFDPRELRKETCLLYEINWGGRHSIWRHTSQNTNKHVEVNFIEKFTTERYFCPNTRCSITWFLSYSPCGECSRAITEFLSRYPHVTLFIYIARLYHHADPENRQGLEDLISSGVTIQIMTEQESGYCWRNFVNYSPSNEAHWPRYPHLWVRLYVLELYCIILGLPPCLNILRRKQPQLTFFTIALQSCHYQRLPPHILWATGLK

SEQ ID NO: 157 - protein, 1367 aa, Artificial Sequence
  Description of Artificial Sequence: Synthetic polypeptide
DKKYSIGLAIGTNSVGWAVITDEYKVPSKKFKVLGNTDRHSIKKNLIGALLFDSGETAERTRLKRTARRRYTRRKNRICYLQEIFSNEMAKVDDSFFHRLEESFLVEEDKKHERHPIFGNIVDEVAYHEKYPTIYHLRKKLVDSTDKADLRLIYLALAHMIKFRGHFLIEGDLNPDNSDVDKLFIQLVQTYNQLFEENPINASGVDAKAILSARLSKSRRLENLIAQLPGEKKNGLFGNLIALSLGLTPNFKSNFDLAEDAKLQLSKDTYDDDLDNLLAQIGDQYADLFLAAKNLSDAILLSDILRVNTEITKAPLSASMIKRYDEHHQDLTLLKALVRQQLPEKYKEIFFDQSKNGYAGYIDGGASQEEFYKFIKPILEKMDGTEELLVKLNREDLLRKQRTFDNGSIPHQIHLGELHAILRRQEDFYPFLKDNREKIEKILTFRIPYYVGPLARGNSRFAWMTRKSEETITPWNFEEVVDKGASAQSFIERMTNFDKNLPNEKVLPKHSLLYEYFTVYNELTKVKYVTEGMRKPAFLSGEQKKAIVDLLFKTNRKVTVKQLKEDYFKKIECFDSVEISGVEDRFNASLGTYHDLLKIIKDKDFLDNEENEDILEDIVLTLTLFEDREMIEERLKTYAHLFDDKVMKQLKRRRYTGWGRLSRKLINGIRDKQSGKTILDFLKSDGFANRNFMQLIHDDSLTFKEDIQKAQVSGQGDSLHEHIANLAGSPAIKKGILQTVKVVDELVKVMGRHKPENIVIEMARENQTTQKGQKNSRERMKRIEEGIKELGSQILKEHPVENTQLQNEKLYLYYLQNGRDMYVDQELDINRLSDYDVDHIVPQSFLKDDSIDNKVLTRSDKNRGKSDNVPSEEVVKKMKNYWRQLLNAKLITQRKFDNLTKAERGGLSELDKAGFIKRQLVETRQITKHVAQILDSRMNTKYDENDKLIREVKVITLKSKLVSDFRKDFQFYKVREINNYHHAHDAYLNAVVGTALIKKYPKLESEFVYGDYKVYDVRKMIAKSEQEIGKATAKYFFYSNIMNFFKTEITLANGEIRKRPLIETNGETGEIVWDKGRDFATVRKVLSMPQVNIVKKTEVQTGGFSKESIRPKRNSDKLIARKKDWDPKKYGGFLWPTVAYSVLVVAKVEKGKSKKLKSVKELLGITIMERSSFEKNPIDFLEAKGYKEVKKDLIIKLPKYSLFELENGRKRMLASAKQLQKGNELALPSKYVNFLYLASHYEKLKGSPEDNEQKQLFVEQHKHYLDEIIEQISEFSKRVILADANLDKVLSAYNKHRDKPIREQAENIIHLFTLTRLGAPRAFKYFDTTIDPKQYRSTKEVLDATLIHQSITGLYETRIDLSQLGGD

SEQ ID NO: 158 - protein, 1367 aa, Artificial Sequence
  Description of Artificial Sequence: Synthetic polypeptide
DKKYSIGLAIGTNSVGWAVITDEYKVPSKKFKVLGNTDRHSIKKNLIGALLFDSGETAEATRLKRTARRRYTRRKNRICYLQEIFSNEMAKVDDSFFHRLEESFLVEEDKKHERHPIFGNIVDEVAYHEKYPTIYHLRKKLVDSTDKADLRLIYLALAHMIKFRGHFLIEGDLNPDNSDVDKLFIQLVQTYNQLFEENPINASGVDAKAILSARLSKSRRLENLIAQLPGEKKNGLFGNLIALSLGLTPNFKSNFDLAEDAKLQLSKDTYDDDLDNLLAQIGDQYADLFLAAKNLSDAILLSDILRVNTEITKAPLSASMIKRYDEHHQDLTLLKALVRQQLPEKYKEIFFDQSKNGYAGYIDGGASQEEFYKFIKPILEKMDGTEELLVKLNREDLLRKQRTFDNGSIPHQIHLGELHAILRRQEDFYPFLKDNREKIEKILTFRIPYYVGPLARGNSRFAWMTRKSEETITPWNFEEVVDKGASAQSFIERMTNFDKNLPNEKVLPKHSLLYEYFTVYNELTKVKYVTEGMRKPAFLSGEQKKAIVDLLFKTNRKVTVKQLKEDYFKKIECFDSVEISGVEDRFNASLGTYHDLLKIIKDKDFLDNEENEDILEDIVLTLTLFEDREMIEERLKTYAHLFDDKVMKQLKRRRYTGWGRLSRKLINGIRDKQSGKTILDFLKSDGFANRNFMQLIHDDSLTFKEDIQKAQVSGQGDSLHEHIANLAGSPAIKKGILQTVKVVDELVKVMGRHKPENIVIEMARENQTTQKGQKNSRERMKRIEEGIKELGSQILKEHPVENTQLQNEKLYLYYLQNGRDMYVDQELDINRLSDYDVDHIVPQSFLKDDSIDNKVLTRSDKNRGKSDNVPSEEVVKKMKNYWRQLLNAKLITQRKFDNLTKAERGGLSELDKAGFIKRQLVETRQITKHVAQILDSRMNTKYDENDKLIREVKVITLKSKLVSDFRKDFQFYKVREINNYHHAHDAYLNAVVGTALIKKYPKLESEFVYGDYKVYDVRKMIAKSEQEIGKATAKYFFYSNIMNFFKTEITLANGEIRKRPLIETNGETGEIVWDKGRDFATVRKVLSMPQVNIVKKTEVQTGGFSKESILPKRNSDKLIARKKDWDPKKYGGFLWPTVAYSVLVVAKVEKGKSKKLKSVKELLGITIMERSSFEKNPIDFLEAKGYKEVKKDLIIKLPKYSLFELENGRKRMLASAKQLQKGNELALPSKYVNFLYLASHYEKLKGSPEDNEQKQLFVEQHKHYLDEIIEQISEFSKRVILADANLDKVLSAYNKHRDKPIREQAENIIHLFTLTNLGAPAAFKYFDTTIDRKQYRSTKEVLDATLIHQSITGLYETRIDLSQLGGD

SEQ ID NO: 159 - protein, 2302 aa, Artificial Sequence
  Description of Artificial Sequence: Synthetic polypeptide
MKRTADGSEFESPKKKRKVSEVEFSHEYWMRHALTLAKRARDEREVPVGAVLVLNNRVIGEGWNRAIGLHDPTAHAEIMALRQGGLVMQNYRLIDATLYVTFEPCVMCAGAMIHSRIGRVVFGVRNSKRGAAGSLMNVLNYPGMNHRVEITEGILADECAALLCDFYRMPRQVFNAQKKAQSSINSGGSSGGSSGSETPGTSESATPESSGGSSGGSDKKYSIGLAIGTNSVGWAVITDEYKVPSKKFKVLGNTDRHSIKKNLIGALLFDSGETAEATRLKRTARRRYTRRKNRICYLQEIFSNEMAKVDDSFFHRLEESFLVEEDKKHERHPIFGNIVDEVAYHEKYPTIYHLRKKLVDSTDKADLRLIYLALAHMIKFRGHFLIEGDLNPDNSDVDKLFIQLVQTYNQLFEENPINASGVDAKAILSARLSKSRRLENLIAQLPGEKKNGLFGNLIALSLGLTPNFKSNFDLAEDAKLQLSKDTYDDDLDNLLAQIGDQYADLFLAAKNLSDAILLSDILRVNTEITKAPLSASMIKRYDEHHQDLTLLKALVRQQLPEKYKEIFFDQSKNGYAGYIDGGASQEEFYKFIKPILEKMDGTEELLVKLNREDLLRKQRTFDNGSIPHQIHLGELHAILRRQEDFYPFLKDNREKIEKILTFRIPYYVGPLARGNSRFAWMTRKSEETITPWNFEEVVDKGASAQSFIERMTNFDKNLPNEKVLPKHSLLYEYFTVYNELTKVKYVTEGMRKPAFLSGEQKKAIVDLLFKTNRKVTVKQLKEDYFKKIECFDSVEISGVEDRFNASLGTYHDLLKIIKDKDFLDNEENEDILEDIVLTLTLFEDREMIEERLKTYAHLFDDKVMKQLKRRRYTGWGRLSRKLINGIRDKQSGKTILDFLKSDGFANRNFMQLIHDDSLTFKEDIQKAQVSGQGDSLHEHIANLAGSPAIKKGILQTVKVVDELVKVMGRHKPENIVIEMARENQTTQKGQKNSRERMKRIEEGIKELGSQILKEHPVENTQLQNEKLYLYYLQNGRDMYVDQELDINRLSDYDVDHIVPQSFLKDDSIDNKVLTRSDKNRGKSDNVPSEEVVKKMKNYWRQLLNAKLITQRKFDNLTKAERGGLSELDKAGFIKRQLVETRQITKHVAQILDSRMNTKYDENDKLIREVKVITLKSKLVSDFRKDFQFYKVREINNYHHAHDAYLNAVVGTALIKKYPKLESEFVYGDYKVYDVRKMIAKSEQEIGKATAKYFFYSNIMNFFKTEITLANGEIRKRPLIETNGETGEIVWDKGRDFATVRKVLSMPQVNIVKKTEVQTGGFSKESILPKRNSDKLIARKKDWDPKKYGGFDSPTVAYSVLVVAKVEKGKSKKLKSVKELLGITIMERSSFEKNPIDFLEAKGYKEVKKDLIIKLPKYSLFELENGRKRMLASAGELQKGNELALPSKYVNFLYLASHYEKLKGSPEDNEQKQLFVEQHKHYLDEIIEQISEFSKRVILADANLDKVLSAYNKHRDKPIREQAENIIHLFTLTNLGAPAAFKYFDTTIDRKRYTSTKEVLDATLIHQSITGLYETRIDLSQLGGDSGGSKRTADGSEFEPKKKRKVSGGSSGGSSGSETPGTSESATPESSGGSSGGSTDAEYVRIHEKLDIYTFKKQFFNNKKSVSHRCYVLFELKRRGERRACFWGYAVNKPQSGTERGIHAEIFSIRKVEEYLRDNPGQFTINWYSSWSPCADCAEKILEWYNQELRGNGHTLKIWACKLYYEKNARNQIGLWNLRDNGVGLNVMVSEHYQCCRKIFIQSSHNQLNENRWLEKTLKRAEKWRSELSIMIQVKILHTTKSPAVSGGSGGSGGSTNLSDIIEKETGKQLVIQESILMLPEEVEEVIGNKPESDILVHTAYDESTDENVMLLTSDAPEYKPWALVIQDSNGENKIKMLSGGSGGSGGSTNLSDIIEKETGKQLVIQESILMLPEEVEEVIGNKPESDILVHTAYDESTDENVMLLTSDAPEYKPWALVIQDSNGENKIKMLGSGATNFSLLKQAGDVEENPGPMVSKGEELFTGVVPILVELDGDVNGHKFSVSGEGEGDATYGKLTLKFICTTGKLPVPWPTLVTTLTYGVQCFSRYPDHMKQHDFFKSAMPEGYVQERTIFFKDDGNYKTRAEVKFEGDTLVNRIELKGIDFKEDGNILGHKLEYNYNSHNVYIMADKQKNGIKVNFKIRHNIEDGSVQLADHYQQNTPIGDGPVLLPDNHYLSTQSALSKDPNEKRDHMVLLEFVTAAGITLGMDELYKSGGSPKKKRKV

SEQ ID NO: 160 - protein, 2116 aa, Artificial Sequence
  Description of Artificial Sequence: Synthetic polypeptide
MKRTADGSEFESPKKKRKVSEVEFSHEYWMRHALTLAKRARDEREVPVGAVLVLNNRVIGEGWNRAIGLHDPTAHAEIMALRQGGLVMQNYRLIDATLYVTFEPCVMCAGAMIHSRIGRVVFGVRNSKRGAAGSLMNVLNYPGMNHRVEITEGILADECAALLCDFYRMPRQVFNAQKKAQSSINSGGSSGGSSGSETPGTSESATPESSGGSSGGSDKKYSIGLAIGTNSVGWAVITDEYKVPSKKFKVLGNTDRHSIKKNLIGALLFDSGETAEATRLKRTARRRYTRRKNRICYLQEIFSNEMAKVDDSFFHRLEESFLVEEDKKHERHPIFGNIVDEVAYHEKYPTIYHLRKKLVDSTDKADLRLIYLALAHMIKFRGHFLIEGDLNPDNSDVDKLFIQLVQTYNQLFEENPINASGVDAKAILSARLSKSRRLENLIAQLPGEKKNGLFGNLIALSLGLTPNFKSNFDLAEDAKLQLSKDTYDDDLDNLLAQIGDQYADLFLAAKNLSDAILLSDILRVNTEITKAPLSASMIKRYDEHHQDLTLLKALVRQQLPEKYKEIFFDQSKNGYAGYIDGGASQEEFYKFIKPILEKMDGTEELLVKLNREDLLRKQRTFDNGSIPHQIHLGELHAILRRQEDFYPFLKDNREKIEKILTFRIPYYVGPLARGNSRFAWMTRKSEETITPWNFEEVVDKGASAQSFIERMTNFDKNLPNEKVLPKHSLLYEYFTVYNELTKVKYVTEGMRKPAFLSGEQKKAIVDLLFKTNRKVTVKQLKEDYFKKIECFDSVEISGVEDRFNASLGTYHDLLKIIKDKDFLDNEENEDILEDIVLTLTLFEDREMIEERLKTYAHLFDDKVMKQLKRRRYTGWGRLSRKLINGIRDKQSGKTILDFLKSDGFANRNFMQLIHDDSLTFKEDIQKAQVSGQGDSLHEHIANLAGSPAIKKGILQTVKVVDELVKVMGRHKPENIVIEMARENQTTQKGQKNSRERMKRIEEGIKELGSQILKEHPVENTQLQNEKLYLYYLQNGRDMYVDQELDINRLSDYDVDHIVPQSFLKDDSIDNKVLTRSDKNRGKSDNVPSEEVVKKMKNYWRQLLNAKLITQRKFDNLTKAERGGLSELDKAGFIKRQLVETRQITKHVAQILDSRMNTKYDENDKLIREVKVITLKSKLVSDFRKDFQFYKVREINNYHHAHDAYLNAVVGTALIKKYPKLESEFVYGDYKVYDVRKMIAKSEQEIGKATAKYFFYSNIMNFFKTEITLANGEIRKRPLIETNGETGEIVWDKGRDFATVRKVLSMPQVNIVKKTEVQTGGFSKESILPKRNSDKLIARKKDWDPKKYGGFDSPTVAYSVLVVAKVEKGKSKKLKSVKELLGITIMERSSFEKNPIDFLEAKGYKEVKKDLIIKLPKYSLFELENGRKRMLASAGELQKGNELALPSKYVNFLYLASHYEKLKGSPEDNEQKQLFVEQHKHYLDEIIEQISEFSKRVILADANLDKVLSAYNKHRDKPIREQAENIIHLFTLTNLGAPAAFKYFDTTIDRKRYTSTKEVLDATLIHQSITGLYETRIDLSQLGGDSGGSKRTADGSEFEPKKKRKVSGGSSGGSSGSETPGTSESATPESSGGSSGGSTDAEYVRIHEKLDIYTFKKQFFNNKKSVSHRCYVLFELKRRGERRACFWGYAVNKPQSGTERGIHAEIFSIRKVEEYLRDNPGQFTINWYSSWSPCADCAEKILEWYNQELRGNGHTLKIWACKLYYEKNARNQIGLWNLRDNGVGLNVMVSEHYQCCRKIFIQSSHNQLNENRWLEKTLKRAEKWRSELSIMIQVKILHTTKSPAVGSGATNFSLLKQAGDVEENPGPMVSKGEELFTGVVPILVELDGDVNGHKFSVSGEGEGDATYGKLTLKFICTTGKLPVPWPTLVTTLTYGVQCFSRYPDHMKQHDFFKSAMPEGYVQERTIFFKDDGNYKTRAEVKFEGDTLVNRIELKGIDFKEDGNILGHKLEYNYNSHNVYIMADKQKNGIKVNFKIRHNIEDGSVQLADHYQQNTPIGDGPVLLPDNHYLSTQSALSKDPNEKRDHMVLLEFVTAAGITLGMDELYKSGGSPKKKRKV

SEQ ID NO: 161 - protein, 2293 aa, Artificial Sequence
  Description of Artificial Sequence: Synthetic polypeptide
MKRTADGSEFESPKKKRKVSEVEFSHEYWMRHALTLAKRARDEREVPVGAVLVLNNRVIGEGWNRAIGLHDPTAHAEIMALRQGGLVMQNYRLIDATLYVTFEPCVMCAGAMIHSRIGRVVFGVRNSKRGAAGSLMNVLNYPGMNHRVEITEGILADECAALLCDFYRMPRQVFNAQKKAQSSINSGGSSGGSSGSETPGTSESATPESSGGSSGGSDKKYSIGLAIGTNSVGWAVITDEYKVPSKKFKVLGNTDRHSIKKNLIGALLFDSGETAEATRLKRTARRRYTRRKNRICYLQEIFSNEMAKVDDSFFHRLEESFLVEEDKKHERHPIFGNIVDEVAYHEKYPTIYHLRKKLVDSTDKADLRLIYLALAHMIKFRGHFLIEGDLNPDNSDVDKLFIQLVQTYNQLFEENPINASGVDAKAILSARLSKSRRLENLIAQLPGEKKNGLFGNLIALSLGLTPNFKSNFDLAEDAKLQLSKDTYDDDLDNLLAQIGDQYADLFLAAKNLSDAILLSDILRVNTEITKAPLSASMIKRYDEHHQDLTLLKALVRQQLPEKYKEIFFDQSKNGYAGYIDGGASQEEFYKFIKPILEKMDGTEELLVKLNREDLLRKQRTFDNGSIPHQIHLGELHAILRRQEDFYPFLKDNREKIEKILTFRIPYYVGPLARGNSRFAWMTRKSEETITPWNFEEVVDKGASAQSFIERMTNFDKNLPNEKVLPKHSLLYEYFTVYNELTKVKYVTEGMRKPAFLSGEQKKAIVDLLFKTNRKVTVKQLKEDYFKKIECFDSVEISGVEDRFNASLGTYHDLLKIIKDKDFLDNEENEDILEDIVLTLTLFEDREMIEERLKTYAHLFDDKVMKQLKRRRYTGWGRLSRKLINGIRDKQSGKTILDFLKSDGFANRNFMQLIHDDSLTFKEDIQKAQVSGQGDSLHEHIANLAGSPAIKKGILQTVKVVDELVKVMGRHKPENIVIEMARENQTTQKGQKNSRERMKRIEEGIKELGSQILKEHPVENTQLQNEKLYLYYLQNGRDMYVDQELDINRLSDYDVDHIVPQSFLKDDSIDNKVLTRSDKNRGKSDNVPSEEVVKKMKNYWRQLLNAKLITQRKFDNLTKAERGGLSELDKAGFIKRQLVETRQITKHVAQILDSRMNTKYDENDKLIREVKVITLKSKLVSDFRKDFQFYKVREINNYHHAHDAYLNAVVGTALIKKYPKLESEFVYGDYKVYDVRKMIAKSEQEIGKATAKYFFYSNIMNFFKTEITLANGEIRKRPLIETNGETGEIVWDKGRDFATVRKVLSMPQVNIVKKTEVQTGGFSKESILPKRNSDKLIARKKDWDPKKYGGFDSPTVAYSVLVVAKVEKGKSKKLKSVKELLGITIMERSSFEKNPIDFLEAKGYKEVKKDLIIKLPKYSLFELENGRKRMLASAGELQKGNELALPSKYVNFLYLASHYEKLKGSPEDNEQKQLFVEQHKHYLDEIIEQISEFSKRVILADANLDKVLSAYNKHRDKPIREQAENIIHLFTLTNLGAPAAFKYFDTTIDRKRYTSTKEVLDATLIHQSITGLYETRIDLSQLGGDSGGSKRTADGSEFEPKKKRKVSGGSSGGSSGSETPGTSESATPESSGGSSGGSEASPASGPRHLMDPHIFTSNFNNGIGRHKTYLCYEVERLDNGTSVKMDQHRGFLHNQAKNLLCGFYGRHAELRFLDLVPSLQLDPAQIYRVTWFISWSPCFSWGCAGEVRAFLQENTHVRLRIFAARIYDYDPLYKEALQMLRDAGAQVSIMTYDEFKHCWDTFVDHQGCPFQPWDGLDEHSQALSGRLRAILQNQGNSGGSGGSGGSTNLSDIIEKETGKQLVIQESILMLPEEVEEVIGNKPESDILVHTAYDESTDENVMLLTSDAPEYKPWALVIQDSNGENKIKMLSGGSGGSGGSTNLSDIIEKETGKQLVIQESILMLPEEVEEVIGNKPESDILVHTAYDESTDENVMLLTSDAPEYKPWALVIQDSNGENKIKMLGSGATNFSLLKQAGDVEENPGPMVSKGEELFTGVVPILVELDGDVNGHKFSVSGEGEGDATYGKLTLKFICTTGKLPVPWPTLVTTLTYGVQCFSRYPDHMKQHDFFKSAMPEGYVQERTIFFKDDGNYKTRAEVKFEGDTLVNRIELKGIDFKEDGNILGHKLEYNYNSHNVYIMADKQKNGIKVNFKIRHNIEDGSVQLADHYQQNTPIGDGPVLLPDNHYLSTQSALSKDPNEKRDHMVLLEFVTAAGITLGMDELYKSGGSPKKKRKV

SEQ ID NO: 162 - protein, 2107 aa, Artificial Sequence
  Description of Artificial Sequence: Synthetic polypeptide
MKRTADGSEFESPKKKRKVSEVEFSHEYWMRHALTLAKRARDEREVPVGAVLVLNNRVIGEGWNRAIGLHDPTAHAEIMALRQGGLVMQNYRLIDATLYVTFEPCVMCAGAMIHSRIGRVVFGVRNSKRGAAGSLMNVLNYPGMNHRVEITEGILADECAALLCDFYRMPRQVFNAQKKAQSSINSGGSSGGSSGSETPGTSESATPESSGGSSGGSDKKYSIGLAIGTNSVGWAVITDEYKVPSKKFKVLGNTDRHSIKKNLIGALLFDSGETAEATRLKRTARRRYTRRKNRICYLQEIFSNEMAKVDDSFFHRLEESFLVEEDKKHERHPIFGNIVDEVAYHEKYPTIYHLRKKLVDSTDKADLRLIYLALAHMIKFRGHFLIEGDLNPDNSDVDKLFIQLVQTYNQLFEENPINASGVDAKAILSARLSKSRRLENLIAQLPGEKKNGLFGNLIALSLGLTPNFKSNFDLAEDAKLQLSKDTYDDDLDNLLAQIGDQYADLFLAAKNLSDAILLSDILRVNTEITKAPLSASMIKRYDEHHQDLTLLKALVRQQLPEKYKEIFFDQSKNGYAGYIDGGASQEEFYKFIKPILEKMDGTEELLVKLNREDLLRKQRTFDNGSIPHQIHLGELHAILRRQEDFYPFLKDNREKIEKILTFRIPYYVGPLARGNSRFAWMTRKSEETITPWNFEEVVDKGASAQSFIERMTNFDKNLPNEKVLPKHSLLYEYFTVYNELTKVKYVTEGMRKPAFLSGEQKKAIVDLLFKTNRKVTVKQLKEDYFKKIECFDSVEISGVEDRFNASLGTYHDLLKIIKDKDFLDNEENEDILEDIVLTLTLFEDREMIEERLKTYAHLFDDKVMKQLKRRRYTGWGRLSRKLINGIRDKQSGKTILDFLKSDGFANRNFMQLIHDDSLTFKEDIQKAQVSGQGDSLHEHIANLAGSPAIKKGILQTVKVVDELVKVMGRHKPENIVIEMARENQTTQKGQKNSRERMKRIEEGIKELGSQILKEHPVENTQLQNEKLYLYYLQNGRDMYVDQELDINRLSDYDVDHIVPQSFLKDDSIDNKVLTRSDKNRGKSDNVPSEEVVKKMKNYWRQLLNAKLITQRKFDNLTKAERGGLSELDKAGFIKRQLVETRQITKHVAQILDSRMNTKYDENDKLIREVKVITLKSKLVSDFRKDFQFYKVREINNYHHAHDAYLNAVVGTALIKKYPKLESEFVYGDYKVYDVRKMIAKSEQEIGKATAKYFFYSNIMNFFKTEITLANGEIRKRPLIETNGETGEIVWDKGRDFATVRKVLSMPQVNIVKKTEVQTGGFSKESILPKRNSDKLIARKKDWDPKKYGGFDSPTVAYSVLVVAKVEKGKSKKLKSVKELLGITIMERSSFEKNPIDFLEAKGYKEVKKDLIIKLPKYSLFELENGRKRMLASAGELQKGNELALPSKYVNFLYLASHYEKLKGSPEDNEQKQLFVEQHKHYLDEIIEQISEFSKRVILADANLDKVLSAYNKHRDKPIREQAENIIHLFTLTNLGAPAAFKYFDTTIDRKRYTSTKEVLDATLIHQSITGLYETRIDLSQLGGDSGGSKRTADGSEFEPKKKRKVSGGSSGGSSGSETPGTSESATPESSGGSSGGSEASPASGPRHLMDPHIFTSNFNNGIGRHKTYLCYEVERLDNGTSVKMDQHRGFLHNQAKNLLCGFYGRHAELRFLDLVPSLQLDPAQIYRVTWFISWSPCFSWGCAGEVRAFLQENTHVRLRIFAARIYDYDPLYKEALQMLRDAGAQVSIMTYDEFKHCWDTFVDHQGCPFQPWDGLDEHSQALSGRLRAILQNQGNGSGATNFSLLKQAGDVEENPGPMVSKGEELFTGVVPILVELDGDVNGHKFSVSGEGEGDATYGKLTLKFICTTGKLPVPWPTLVTTLTYGVQCFSRYPDHMKQHDFFKSAMPEGYVQERTIFFKDDGNYKTRAEVKFEGDTLVNRIELKGIDFKEDGNILGHKLEYNYNSHNVYIMADKQKNGIKVNFKIRHNIEDGSVQLADHYQQNTPIGDGPVLLPDNHYLSTQSALSKDPNEKRDHMVLLEFVTAAGITLGMDELYKSGGSPKKKRKV

SEQ ID NO: 163 - protein, 2309 aa, Artificial Sequence
  Description of Artificial Sequence: Synthetic polypeptide
MKRTADGSEFESPKKKRKVEASPASGPRHLMDPHIFTSNFNNGIGRHKTYLCYEVERLDNGTSVKMDQHRGFLHNQAKNLLCGFYGRHAELRFLDLVPSLQLDPAQIYRVTWFISWSPCFSWGCAGEVRAFLQENTHVRLRIFAARIYDYDPLYKEALQMLRDAGAQVSIMTYDEFKHCWDTFVDHQGCPFQPWDGLDEHSQALSGRLRAILQNQGNSGSETPGTSESATPESSGGSSGGSSGSETPGTSESATPESSGGSSGGSSEVEFSHEYWMRHALTLAKRARDEREVPVGAVLVLNNRVIGEGWNRAIGLHDPTAHAEIMALRQGGLVMQNYRLIDATLYVTFEPCVMCAGAMIHSRIGRVVFGVRNSKRGAAGSLMNVLNYPGMNHRVEITEGILADECAALLCDFYRMPRQVFNAQKKAQSSINSGGSSGGSSGSETPGTSESATPESSGGSSGGSDKKYSIGLAIGTNSVGWAVITDEYKVPSKKFKVLGNTDRHSIKKNLIGALLFDSGETAEATRLKRTARRRYTRRKNRICYLQEIFSNEMAKVDDSFFHRLEESFLVEEDKKHERHPIFGNIVDEVAYHEKYPTIYHLRKKLVDSTDKADLRLIYLALAHMIKFRGHFLIEGDLNPDNSDVDKLFIQLVQTYNQLFEENPINASGVDAKAILSARLSKSRRLENLIAQLPGEKKNGLFGNLIALSLGLTPNFKSNFDLAEDAKLQLSKDTYDDDLDNLLAQIGDQYADLFLAAKNLSDAILLSDILRVNTEITKAPLSASMIKRYDEHHQDLTLLKALVRQQLPEKYKEIFFDQSKNGYAGYIDGGASQEEFYKFIKPILEKMDGTEELLVKLNREDLLRKQRTFDNGSIPHQIHLGELHAILRRQEDFYPFLKDNREKIEKILTFRIPYYVGPLARGNSRFAWMTRKSEETITPWNFEEVVDKGASAQSFIERMTNFDKNLPNEKVLPKHSLLYEYFTVYNELTKVKYVTEGMRKPAFLSGEQKKAIVDLLFKTNRKVTVKQLKEDYFKKIECFDSVEISGVEDRFNASLGTYHDLLKIIKDKDFLDNEENEDILEDIVLTLTLFEDREMIEERLKTYAHLFDDKVMKQLKRRRYTGWGRLSRKLINGIRDKQSGKTILDFLKSDGFANRNFMQLIHDDSLTFKEDIQKAQVSGQGDSLHEHIANLAGSPAIKKGILQTVKVVDELVKVMGRHKPENIVIEMARENQTTQKGQKNSRERMKRIEEGIKELGSQILKEHPVENTQLQNEKLYLYYLQNGRDMYVDQELDINRLSDYDVDHIVPQSFLKDDSIDNKVLTRSDKNRGKSDNVPSEEVVKKMKNYWRQLLNAKLITQRKFDNLTKAERGGLSELDKAGFIKRQLVETRQITKHVAQILDSRMNTKYDENDKLIREVKVITLKSKLVSDFRKDFQFYKVREINNYHHAHDAYLNAVVGTALIKKYPKLESEFVYGDYKVYDVRKMIAKSEQEIGKATAKYFFYSNIMNFFKTEITLANGEIRKRPLIETNGETGEIVWDKGRDFATVRKVLSMPQVNIVKKTEVQTGGFSKESILPKRNSDKLIARKKDWDPKKYGGFDSPTVAYSVLVVAKVEKGKSKKLKSVKELLGITIMERSSFEKNPIDFLEAKGYKEVKKDLIIKLPKYSLFELENGRKRMLASAGELQKGNELALPSKYVNFLYLASHYEKLKGSPEDNEQKQLFVEQHKHYLDEIIEQISEFSKRVILADANLDKVLSAYNKHRDKPIREQAENIIHLFTLTNLGAPAAFKYFDTTIDRKRYTSTKEVLDATLIHQSITGLYETRIDLSQLGGDSGGSKRTADGSEFEPKKKRKVSGGSGGSGGSTNLSDIIEKETGKQLVIQESILMLPEEVEEVIGNKPESDILVHTAYDESTDENVMLLTSDAPEYKPWALVIQDSNGENKIKMLSGGSGGSGGSTNLSDIIEKETGKQLVIQESILMLPEEVEEVIGNKPESDILVHTAYDESTDENVMLLTSDAPEYKPWALVIQDSNGENKIKMLGSGATNFSLLKQAGDVEENPGPMVSKGEELFTGVVPILVELDGDVNGHKFSVSGEGEGDATYGKLTLKFICTTGKLPVPWPTLVTTLTYGVQCFSRYPDHMKQHDFFKSAMPEGYVQERTIFFKDDGNYKTRAEVKFEGDTLVNRIELKGIDFKEDGNILGHKLEYNYNSHNVYIMADKQKNGIKVNFKIRHNIEDGSVQLADHYQQNTPIGDGPVLLPDNHYLSTQSALSKDPNEKRDHMVLLEFVTAAGITLGMDELYKSGGSPKKKRKV

SEQ ID NO: 164 - protein, 2123 aa, Artificial Sequence
  Description of Artificial Sequence: Synthetic polypeptide
MKRTADGSEFESPKKKRKVEASPASGPRHLMDPHIFTSNFNNGIGRHKTYLCYEVERLDNGTSVKMDQHRGFLHNQAKNLLCGFYGRHAELRFLDLVPSLQLDPAQIYRVTWFISWSPCFSWGCAGEVRAFLQENTHVRLRIFAARIYDYDPLYKEALQMLRDAGAQVSIMTYDEFKHCWDTFVDHQGCPFQPWDGLDEHSQALSGRLRAILQNQGNSGSETPGTSESATPESSGGSSGGSSGSETPGTSESATPESSGGSSGGSSEVEFSHEYWMRHALTLAKRARDEREVPVGAVLVLNNRVIGEGWNRAIGLHDPTAHAEIMALRQGGLVMQNYRLIDATLYVTFEPCVMCAGAMIHSRIGRVVFGVRNSKRGAAGSLMNVLNYPGMNHRVEITEGILADECAALLCDFYRMPRQVFNAQKKAQSSINSGGSSGGSSGSETPGTSESATPESSGGSSGGSDKKYSIGLAIGTNSVGWAVITDEYKVPSKKFKVLGNTDRHSIKKNLIGALLFDSGETAEATRLKRTARRRYTRRKNRICYLQEIFSNEMAKVDDSFFHRLEESFLVEEDKKHERHPIFGNIVDEVAYHEKYPTIYHLRKKLVDSTDKADLRLIYLALAHMIKFRGHFLIEGDLNPDNSDVDKLFIQLVQTYNQLFEENPINASGVDAKAILSARLSKSRRLENLIAQLPGEKKNGLFGNLIALSLGLTPNFKSNFDLAEDAKLQLSKDTYDDDLDNLLAQIGDQYADLFLAAKNLSDAILLSDILRVNTEITKAPLSASMIKRYDEHHQDLTLLKALVRQQLPEKYKEIFFDQSKNGYAGYIDGGASQEEFYKFIKPILEKMDGTEELLVKLNREDLLRKQRTFDNGSIPHQIHLGELHAILRRQEDFYPFLKDNREKIEKILTFRIPYYVGPLARGNSRFAWMTRKSEETITPWNFEEVVDKGASAQSFIERMTNFDKNLPNEKVLPKHSLLYEYFTVYNELTKVKYVTEGMRKPAFLSGEQKKAIVDLLFKTNRKVTVKQLKEDYFKKIECFDSVEISGVEDRFNASLGTYHDLLKIIKDKDFLDNEENEDILEDIVLTLTLFEDREMIEERLKTYAHLFDDKVMKQLKRRRYTGWGRLSRKLINGIRDKQSGKTILDFLKSDGFANRNFMQLIHDDSLTFKEDIQKAQVSGQGDSLHEHIANLAGSPAIKKGILQTVKVVDELVKVMGRHKPENIVIEMARENQTTQKGQKNSRERMKRIEEGIKELGSQILKEHPVENTQLQNEKLYLYYLQNGRDMYVDQELDINRLSDYDVDHIVPQSFLKDDSIDNKVLTRSDKNRGKSDNVPSEEVVKKMKNYWRQLLNAKLITQRKFDNLTKAERGGLSELDKAGFIKRQLVETRQITKHVAQILDSRMNTKYDENDKLIREVKVITLKSKLVSDFRKDFQFYKVREINNYHHAHDAYLNAVVGTALIKKYPKLESEFVYGDYKVYDVRKMIAKSEQEIGKATAKYFFYSNIMNFFKTEITLANGEIRKRPLIETNGETGEIVWDKGRDFATVRKVLSMPQVNIVKKTEVQTGGFSKESILPKRNSDKLIARKKDWDPKKYGGFDSPTVAYSVLVVAKVEKGKSKKLKSVKELLGITIMERSSFEKNPIDFLEAKGYKEVKKDLIIKLPKYSLFELENGRKRMLASAGELQKGNELALPSKYVNFLYLASHYEKLKGSPEDNEQKQLFVEQHKHYLDEIIEQISEFSKRVILADANLDKVLSAYNKHRDKPIREQAENIIHLFTLTNLGAPAAFKYFDTTIDRKRYTSTKEVLDATLIHQSITGLYETRIDLSQLGGDSGGSKRTADGSEFEPKKKRKVGSGATNFSLLKQAGDVEENPGPMVSKGEELFTGVVPILVELDGDVNGHKFSVSGEGEGDATYGKLTLKFICTTGKLPVPWPTLVTTLTYGVQCFSRYPDHMKQHDFFKSAMPEGYVQERTIFFKDDGNYKTRAEVKFEGDTLVNRIELKGIDFKEDGNILGHKLEYNYNSHNVYIMADKQKNGIKVNFKIRHNIEDGSVQLADHYQQNTPIGDGPVLLPDNHYLSTQSALSKDPNEKRDHMVLLEFVTAAGITLGMDELYKSGGSPKKKRKV

SEQ ID NO: 165 - protein, 2309 aa, Artificial Sequence
  Description of Artificial Sequence: Synthetic polypeptide
MKRTADGSEFESPKKKRKVSEVEFSHEYWMRHALTLAKRARDEREVPVGAVLVLNNRVIGEGWNRAIGLHDPTAHAEIMALRQGGLVMQNYRLIDATLYVTFEPCVMCAGAMIHSRIGRVVFGVRNSKRGAAGSLMNVLNYPGMNHRVEITEGILADECAALLCDFYRMPRQVFNAQKKAQSSINSGSETPGTSESATPESSGGSSGGSSGSETPGTSESATPESSGGSSGGSEASPASGPRHLMDPHIFTSNFNNGIGRHKTYLCYEVERLDNGTSVKMDQHRGFLHNQAKNLLCGFYGRHAELRFLDLVPSLQLDPAQIYRVTWFISWSPCFSWGCAGEVRAFLQENTHVRLRIFAARIYDYDPLYKEALQMLRDAGAQVSIMTYDEFKHCWDTFVDHQGCPFQPWDGLDEHSQALSGRLRAILQNQGNSGGSSGGSSGSETPGTSESATPESSGGSSGGSDKKYSIGLAIGTNSVGWAVITDEYKVPSKKFKVLGNTDRHSIKKNLIGALLFDSGETAEATRLKRTARRRYTRRKNRICYLQEIFSNEMAKVDDSFFHRLEESFLVEEDKKHERHPIFGNIVDEVAYHEKYPTIYHLRKKLVDSTDKADLRLIYLALAHMIKFRGHFLIEGDLNPDNSDVDKLFIQLVQTYNQLFEENPINASGVDAKAILSARLSKSRRLENLIAQLPGEKKNGLFGNLIALSLGLTPNFKSNFDLAEDAKLQLSKDTYDDDLDNLLAQIGDQYADLFLAAKNLSDAILLSDILRVNTEITKAPLSASMIKRYDEHHQDLTLLKALVRQQLPEKYKEIFFDQSKNGYAGYIDGGASQEEFYKFIKPILEKMDGTEELLVKLNREDLLRKQRTFDNGSIPHQIHLGELHAILRRQEDFYPFLKDNREKIEKILTFRIPYYVGPLARGNSRFAWMTRKSEETITPWNFEEVVDKGASAQSFIERMTNFDKNLPNEKVLPKHSLLYEYFTVYNELTKVKYVTEGMRKPAFLSGEQKKAIVDLLFKTNRKVTVKQLKEDYFKKIECFDSVEISGVEDRFNASLGTYHDLLKIIKDKDFLDNEENEDILEDIVLTLTLFEDREMIEERLKTYAHLFDDKVMKQLKRRRYTGWGRLSRKLINGIRDKQSGKTILDFLKSDGFANRNFMQLIHDDSLTFKEDIQKAQVSGQGDSLHEHIANLAGSPAIKKGILQTVKVVDELVKVMGRHKPENIVIEMARENQTTQKGQKNSRERMKRIEEGIKELGSQILKEHPVENTQLQNEKLYLYYLQNGRDMYVDQELDINRLSDYDVDHIVPQSFLKDDSIDNKVLTRSDKNRGKSDNVPSEEVVKKMKNYWRQLLNAKLITQRKFDNLTKAERGGLSELDKAGFIKRQLVETRQITKHVAQILDSRMNTKYDENDKLIREVKVITLKSKLVSDFRKDFQFYKVREINNYHHAHDAYLNAVVGTALIKKYPKLESEFVYGDYKVYDVRKMIAKSEQEIGKATAKYFFYSNIMNFFKTEITLANGEIRKRPLIETNGETGEIVWDKGRDFATVRKVLSMPQVNIVKKTEVQTGGFSKESILPKRNSDKLIARKKDWDPKKYGGFDSPTVAYSVLVVAKVEKGKSKKLKSVKELLGITIMERSSFEKNPIDFLEAKGYKEVKKDLIIKLPKYSLFELENGRKRMLASAGELQKGNELALPSKYVNFLYLASHYEKLKGSPEDNEQKQLFVEQHKHYLDEIIEQISEFSKRVILADANLDKVLSAYNKHRDKPIREQAENIIHLFTLTNLGAPAAFKYFDTTIDRKRYTSTKEVLDATLIHQSITGLYETRIDLSQLGGDSGGSKRTADGSEFEPKKKRKVSGGSGGSGGSTNLSDIIEKETGKQLVIQESILMLPEEVEEVIGNKPESDILVHTAYDESTDENVMLLTSDAPEYKPWALVIQDSNGENKIKMLSGGSGGSGGSTNLSDIIEKETGKQLVIQESILMLPEEVEEVIGNKPESDILVHTAYDESTDENVMLLTSDAPEYKPWALVIQDSNGENKIKMLGSGATNFSLLKQAGDVEENPGPMVSKGEELFTGVVPILVELDGDVNGHKFSVSGEGEGDATYGKLTLKFICTTGKLPVPWPTLVTTLTYGVQCFSRYPDHMKQHDFFKSAMPEGYVQERTIFFKDDGNYKTRAEVKFEGDTLVNRIELKGIDFKEDGNILGHKLEYNYNSHNVYIMADKQKNGIKVNFKIRHNIEDGSVQLADHYQQNTPIGDGPVLLPDNHYLSTQSALSKDPNEKRDHMVLLEFVTAAGITLGMDELYKSGGSPKKKRKV

SEQ ID NO: 166 - protein, 2123 aa, Artificial Sequence
  Description of Artificial Sequence: Synthetic polypeptide
MKRTADGSEFESPKKKRKVSEVEFSHEYWMRHALTLAKRARDEREVPVGAVLVLNNRVIGEGWNRAIGLHDPTAHAEIMALRQGGLVMQNYRLIDATLYVTFEPCVMCAGAMIHSRIGRVVFGVRNSKRGAAGSLMNVLNYPGMNHRVEITEGILADECAALLCDFYRMPRQVFNAQKKAQSSINSGSETPGTSESATPESSGGSSGGSSGSETPGTSESATPESSGGSSGGSEASPASGPRHLMDPHIFTSNFNNGIGRHKTYLCYEVERLDNGTSVKMDQHRGFLHNQAKNLLCGFYGRHAELRFLDLVPSLQLDPAQIYRVTWFISWSPCFSWGCAGEVRAFLQENTHVRLRIFAARIYDYDPLYKEALQMLRDAGAQVSIMTYDEFKHCWDTFVDHQGCPFQPWDGLDEHSQALSGRLRAILQNQGNSGGSSGGSSGSETPGTSESATPESSGGSSGGSDKKYSIGLAIGTNSVGWAVITDEYKVPSKKFKVLGNTDRHSIKKNLIGALLFDSGETAEATRLKRTARRRYTRRKNRICYLQEIFSNEMAKVDDSFFHRLEESFLVEEDKKHERHPIFGNIVDEVAYHEKYPTIYHLRKKLVDSTDKADLRLIYLALAHMIKFRGHFLIEGDLNPDNSDVDKLFIQLVQTYNQLFEENPINASGVDAKAILSARLSKSRRLENLIAQLPGEKKNGLFGNLIALSLGLTPNFKSNFDLAEDAKLQLSKDTYDDDLDNLLAQIGDQYADLFLAAKNLSDAILLSDILRVNTEITKAPLSASMIKRYDEHHQDLTLLKALVRQQLPEKYKEIFFDQSKNGYAGYIDGGASQEEFYKFIKPILEKMDGTEELLVKLNREDLLRKQRTFDNGSIPHQIHLGELHAILRRQEDFYPFLKDNREKIEKILTFRIPYYVGPLARGNSRFAWMTRKSEETITPWNFEEVVDKGASAQSFIERMTNFDKNLPNEKVLPKHSLLYEYFTVYNELTKVKYVTEGMRKPAFLSGEQKKAIVDLLFKTNRKVTVKQLKEDYFKKIECFDSVEISGVEDRFNASLGTYHDLLKIIKDKDFLDNEENEDILEDIVLTLTLFEDREMIEERLKTYAHLFDDKVMKQLKRRRYTGWGRLSRKLINGIRDKQSGKTILDFLKSDGFANRNFMQLIHDDSLTFKEDIQKAQVSGQGDSLHEHIANLAGSPAIKKGILQTVKVVDELVKVMGRHKPENIVIEMARENQTTQKGQKNSRERMKRIEEGIKELGSQILKEHPVENTQLQNEKLYLYYLQNGRDMYVDQELDINRLSDYDVDHIVPQSFLKDDSIDNKVLTRSDKNRGKSDNVPSEEVVKKMKNYWRQLLNAKLITQRKFDNLTKAERGGLSELDKAGFIKRQLVETRQITKHVAQILDSRMNTKYDENDKLIREVKVITLKSKLVSDFRKDFQFYKVREINNYHHAHDAYLNAVVGTALIKKYPKLESEFVYGDYKVYDVRKMIAKSEQEIGKATAKYFFYSNIMNFFKTEITLANGEIRKRPLIETNGETGEIVWDKGRDFATVRKVLSMPQVNIVKKTEVQTGGFSKESILPKRNSDKLIARKKDWDPKKYGGFDSPTVAYSVLVVAKVEKGKSKKLKSVKELLGITIMERSSFEKNPIDFLEAKGYKEVKKDLIIKLPKYSLFELENGRKRMLASAGELQKGNELALPSKYVNFLYLASHYEKLKGSPEDNEQKQLFVEQHKHYLDEIIEQISEFSKRVILADANLDKVLSAYNKHRDKPIREQAENIIHLFTLTNLGAPAAFKYFDTTIDRKRYTSTKEVLDATLIHQSITGLYETRIDLSQLGGDSGGSKRTADGSEFEPKKKRKVGSGATNFSLLKQAGDVEENPGPMVSKGEELFTGVVPILVELDGDVNGHKFSVSGEGEGDATYGKLTLKFICTTGKLPVPWPTLVTTLTYGVQCFSRYPDHMKQHDFFKSAMPEGYVQERTIFFKDDGNYKTRAEVKFEGDTLVNRIELKGIDFKEDGNILGHKLEYNYNSHNVYIMADKQKNGIKVNFKIRHNIEDGSVQLADHYQQNTPIGDGPVLLPDNHYLSTQSALSKDPNEKRDHMVLLEFVTAAGITLGMDELYKSGGSPKKKRKV

SEQ ID NO: 167 - protein, 2293 aa, Artificial Sequence
  Description of Artificial Sequence: Synthetic polypeptide
MKRTADGSEFESPKKKRKVEASPASGPRHLMDPHIFTSNFNNGIGRHKTYLCYEVERLDNGTSVKMDQHRGFLHNQAKNLLCGFYGRHAELRFLDLVPSLQLDPAQIYRVTWFISWSPCFSWGCAGEVRAFLQENTHVRLRIFAARIYDYDPLYKEALQMLRDAGAQVSIMTYDEFKHCWDTFVDHQGCPFQPWDGLDEHSQALSGRLRAILQNQGNSGGSSGGSSGSETPGTSESATPESSGGSSGGSSEVEFSHEYWMRHALTLAKRARDEREVPVGAVLVLNNRVIGEGWNRAIGLHDPTAHAEIMALRQGGLVMQNYRLIDATLYVTFEPCVMCAGAMIHSRIGRVVFGVRNSKRGAAGSLMNVLNYPGMNHRVEITEGILADECAALLCDFYRMPRQVFNAQKKAQSSINSGGSSGGSSGSETPGTSESATPESSGGSSGGSDKKYSIGLAIGTNSVGWAVITDEYKVPSKKFKVLGNTDRHSIKKNLIGALLFDSGETAEATRLKRTARRRYTRRKNRICYLQEIFSNEMAKVDDSFFHRLEESFLVEEDKKHERHPIFGNIVDEVAYHEKYPTIYHLRKKLVDSTDKADLRLIYLALAHMIKFRGHFLIEGDLNPDNSDVDKLFIQLVQTYNQLFEENPINASGVDAKAILSARLSKSRRLENLIAQLPGEKKNGLFGNLIALSLGLTPNFKSNFDLAEDAKLQLSKDTYDDDLDNLLAQIGDQYADLFLAAKNLSDAILLSDILRVNTEITKAPLSASMIKRYDEHHQDLTLLKALVRQQLPEKYKEIFFDQSKNGYAGYIDGGASQEEFYKFIKPILEKMDGTEELLVKLNREDLLRKQRTFDNGSIPHQIHLGELHAILRRQEDFYPFLKDNREKIEKILTFRIPYYVGPLARGNSRFAWMTRKSEETITPWNFEEVVDKGASAQSFIERMTNFDKNLPNEKVLPKHSLLYEYFTVYNELTKVKYVTEGMRKPAFLSGEQKKAIVDLLFKTNRKVTVKQLKEDYFKKIECFDSVEISGVEDRFNASLGTYHDLLKIIKDKDFLDNEENEDILEDIVLTLTLFEDREMIEERLKTYAHLFDDKVMKQLKRRRYTGWGRLSRKLINGIRDKQSGKTILDFLKSDGFANRNFMQLIHDDSLTFKEDIQKAQVSGQGDSLHEHIANLAGSPAIKKGILQTVKVVDELVKVMGRHKPENIVIEMARENQTTQKGQKNSRERMKRIEEGIKELGSQILKEHPVENTQLQNEKLYLYYLQNGRDMYVDQELDINRLSDYDVDHIVPQSFLKDDSIDNKVLTRSDKNRGKSDNVPSEEVVKKMKNYWRQLLNAKLITQRKFDNLTKAERGGLSELDKAGFIKRQLVETRQITKHVAQILDSRMNTKYDENDKLIREVKVITLKSKLVSDFRKDFQFYKVREINNYHHAHDAYLNAVVGTALIKKYPKLESEFVYGDYKVYDVRKMIAKSEQEIGKATAKYFFYSNIMNFFKTEITLANGEIRKRPLIETNGETGEIVWDKGRDFATVRKVLSMPQVNIVKKTEVQTGGFSKESILPKRNSDKLIARKKDWDPKKYGGFDSPTVAYSVLVVAKVEKGKSKKLKSVKELLGITIMERSSFEKNPIDFLEAKGYKEVKKDLIIKLPKYSLFELENGRKRMLASAGELQKGNELALPSKYVNFLYLASHYEKLKGSPEDNEQKQLFVEQHKHYLDEIIEQISEFSKRVILADANLDKVLSAYNKHRDKPIREQAENIIHLFTLTNLGAPAAFKYFDTTIDRKRYTSTKEVLDATLIHQSITGLYETRIDLSQLGGDSGGSKRTADGSEFEPKKKRKVSGGSGGSGGSTNLSDIIEKETGKQLVIQESILMLPEEVEEVIGNKPESDILVHTAYDESTDENVMLLTSDAPEYKPWALVIQDSNGENKIKMLSGGSGGSGGSTNLSDIIEKETGKQLVIQESILMLPEEVEEVIGNKPESDILVHTAYDESTDENVMLLTSDAPEYKPWALVIQDSNGENKIKMLGSGATNFSLLKQAGDVEENPGPMVSKGEELFTGVVPILVELDGDVNGHKFSVSGEGEGDATYGKLTLKFICTTGKLPVPWPTLVTTLTYGVQCFSRYPDHMKQHDFFKSAMPEGYVQERTIFFKDDGNYKTRAEVKFEGDTLVNRIELKGIDFKEDGNILGHKLEYNYNSHNVYIMADKQKNGIKVNFKIRHNIEDGSVQLADHYQQNTPIGDGPVLLPDNHYLSTQSALSKDPNEKRDHMVLLEFVTAAGITLGMDELYKSGGSPKKKRKV

SEQ ID NO: 168 - protein, 2107 aa, Artificial Sequence
  Description of Artificial Sequence: Synthetic polypeptide
MKRTADGSEFESPKKKRKVEASPASGPRHLMDPHIFTSNFNNGIGRHKTYLCYEVERLDNGTSVKMDQHRGFLHNQAKNLLCGFYGRHAELRFLDLVPSLQLDPAQIYRVTWFISWSPCFSWGCAGEVRAFLQENTHVRLRIFAARIYDYDPLYKEALQMLRDAGAQVSIMTYDEFKHCWDTFVDHQGCPFQPWDGLDEHSQALSGRLRAILQNQGNSGGSSGGSSGSETPGTSESATPESSGGSSGGSSEVEFSHEYWMRHALTLAKRARDEREVPVGAVLVLNNRVIGEGWNRAIGLHDPTAHAEIMALRQGGLVMQNYRLIDATLYVTFEPCVMCAGAMIHSRIGRVVFGVRNSKRGAAGSLMNVLNYPGMNHRVEITEGILADECAALLCDFYRMPRQVFNAQKKAQSSINSGGSSGGSSGSETPGTSESATPESSGGSSGGSDKKYSIGLAIGTNSVGWAVITDEYKVPSKKFKVLGNTDRHSIKKNLIGALLFDSGETAEATRLKRTARRRYTRRKNRICYLQEIFSNEMAKVDDSFFHRLEESFLVEEDKKHERHPIFGNIVDEVAYHEKYPTIYHLRKKLVDSTDKADLRLIYLALAHMIKFRGHFLIEGDLNPDNSDVDKLFIQLVQTYNQLFEENPINASGVDAKAILSARLSKSRRLENLIAQLPGEKKNGLFGNLIALSLGLTPNFKSNFDLAEDAKLQLSKDTYDDDLDNLLAQIGDQYADLFLAAKNLSDAILLSDILRVNTEITKAPLSASMIKRYDEHHQDLTLLKALVRQQLPEKYKEIFFDQSKNGYAGYIDGGASQEEFYKFIKPILEKMDGTEELLVKLNREDLLRKQRTFDNGSIPHQIHLGELHAILRRQEDFYPFLKDNREKIEKILTFRIPYYVGPLARGNSRFAWMTRKSEETITPWNFEEVVDKGASAQSFIERMTNFDKNLPNEKVLPKHSLLYEYFTVYNELTKVKYVTEGMRKPAFLSGEQKKAIVDLLFKTNRKVTVKQLKEDYFKKIECFDSVEISGVEDRFNASLGTYHDLLKIIKDKDFLDNEENEDILEDIVLTLTLFEDREMIEERLKTYAHLFDDKVMKQLKRRRYTGWGRLSRKLINGIRDKQSGKTILDFLKSDGFANRNFMQLIHDDSLTFKEDIQKAQVSGQGDSLHEHIANLAGSPAIKKGILQTVKVVDELVKVMGRHKPENIVIEMARENQTTQKGQKNSRERMKRIEEGIKELGSQILKEHPVENTQLQNEKLYLYYLQNGRDMYVDQELDINRLSDYDVDHIVPQSFLKDDSIDNKVLTRSDKNRGKSDNVPSEEVVKKMKNYWRQLLNAKLITQRKFDNLTKAERGGLSELDKAGFIKRQLVETRQITKHVAQILDSRMNTKYDENDKLIREVKVITLKSKLVSDFRKDFQFYKVREINNYHHAHDAYLNAVVGTALIKKYPKLESEFVYGDYKVYDVRKMIAKSEQEIGKATAKYFFYSNIMNFFKTEITLANGEIRKRPLIETNGETGEIVWDKGRDFATVRKVLSMPQVNIVKKTEVQTGGFSKESILPKRNSDKLIARKKDWDPKKYGGFDSPTVAYSVLVVAKVEKGKSKKLKSVKELLGITIMERSSFEKNPIDFLEAKGYKEVKKDLIIKLPKYSLFELENGRKRMLASAGELQKGNELALPSKYVNFLYLASHYEKLKGSPEDNEQKQLFVEQHKHYLDEIIEQISEFSKRVILADANLDKVLSAYNKHRDKPIREQAENIIHLFTLTNLGAPAAFKYFDTTIDRKRYTSTKEVLDATLIHQSITGLYETRIDLSQLGGDSGGSKRTADGSEFEPKKKRKVGSGATNFSLLKQAGDVEENPGPMVSKGEELFTGVVPILVELDGDVNGHKFSVSGEGEGDATYGKLTLKFICTTGKLPVPWPTLVTTLTYGVQCFSRYPDHMKQHDFFKSAMPEGYVQERTIFFKDDGNYKTRAEVKFEGDTLVNRIELKGIDFKEDGNILGHKLEYNYNSHNVYIMADKQKNGIKVNFKIRHNIEDGSVQLADHYQQNTPIGDGPVLLPDNHYLSTQSALSKDPNEKRDHMVLLEFVTAAGITLGMDELYKSGGSPKKKRKV

SEQ ID NO: 169 - DNA, 104 bp, Artificial Sequence
  Description of Artificial Sequence: Synthetic polynucleotide
  modified_base (1)..(20): a, c, t, g, unknown or other
nnnnnnnnnnnnnnnnnnnncgttttagagctagaaatagcaagttaaaataaggctagtccgttatcaacttgaaaaagtggcaccgagtcggtgcttttttt

SEQ ID NO: 170 - DNA, 20 bp, Artificial Sequence
  Description of Artificial Sequence: Synthetic oligonucleotide
gagtatgaggcatagactgc

SEQ ID NO: 171 - DNA, 20 bp, Artificial Sequence
  Description of Artificial Sequence: Synthetic oligonucleotide
gtcaagaaagcagagactgc

SEQ ID NO: 172 - DNA, 20 bp, Artificial Sequence
  Description of Artificial Sequence: Synthetic oligonucleotide
gagcaaagagaatagactgt

SEQ ID NO: 173 - DNA, 20 bp, Artificial Sequence
  Description of Artificial Sequence: Synthetic oligonucleotide
gaatactaagcatagactcc

SEQ ID NO: 174 - DNA, 20 bp, Artificial Sequence
  Description of Artificial Sequence: Synthetic oligonucleotide
gtaaacaaagcatagactga

SEQ ID NO: 175 - DNA, 20 bp, Artificial Sequence
  Description of Artificial Sequence: Synthetic oligonucleotide
gaagaccaaggatagactgc

SEQ ID NO: 176 - DNA, 20 bp, Artificial Sequence
  Description of Artificial Sequence: Synthetic oligonucleotide
gaacataaagaatagaatga

SEQ ID NO: 177 - DNA, 20 bp, Artificial Sequence
  Description of Artificial Sequence: Synthetic oligonucleotide
ggacaggcagcatagactgt

SEQ ID NO: 178 - DNA, 20 bp, Artificial Sequence
  Description of Artificial Sequence: Synthetic oligonucleotide
ggctaaagaccatagactgt

SEQ ID NO: 179 - DNA, 20 bp, Artificial Sequence
  Description of Artificial Sequence: Synthetic oligonucleotide
gtctagaaagcttagactgc

SEQ ID NO: 180 - DNA, 20 bp, Artificial Sequence
  Description of Artificial Sequence: Synthetic oligonucleotide
gacaaagaggaagagagacg

SEQ ID NO: 181 - DNA, 20 bp, Artificial Sequence
  Description of Artificial Sequence: Synthetic oligonucleotide
acacacacacttagaatctg

SEQ ID NO: 182 - DNA, 20 bp, Artificial Sequence
  Description of Artificial Sequence: Synthetic oligonucleotide
cacacacacttagaatctgt

SEQ ID NO: 183 - DNA, 20 bp, Artificial Sequence
  Description of Artificial Sequence: Synthetic oligonucleotide
gagtccgagcagaagaagaa

SEQ ID NO: 184 - DNA, 20 bp, Artificial Sequence
  Description of Artificial Sequence: Synthetic oligonucleotide
gtattcacctgaaagtgtgc

SEQ ID NO: 185 - DNA, 20 bp, Artificial Sequence
  Description of Artificial Sequence: Synthetic oligonucleotide
ggaatcccttctgcagcacc

SEQ ID NO: 186 - DNA, 20 bp, Artificial Sequence
  Description of Artificial Sequence: Synthetic oligonucleotide
gaacacaaagcatagactgc

SEQ ID NO: 187 - DNA, 20 bp, Artificial Sequence
  Description of Artificial Sequence: Synthetic oligonucleotide
ggcccagactgagcacgtga

SEQ ID NO: 188 - DNA, 20 bp, Artificial Sequence
  Description of Artificial Sequence: Synthetic oligonucleotide
ggcactgcggctggaggtgg

SEQ ID NO: 189 - DNA, 20 bp, Artificial Sequence
  Description of Artificial Sequence: Synthetic oligonucleotide
gcgtgacttccacatgagcg

SEQ ID NO: 190 - DNA, 20 bp, Artificial Sequence
  Description of Artificial Sequence: Synthetic oligonucleotide
ggcactcgggggcgagagga

SEQ ID NO: 191 - DNA, 20 bp, Artificial Sequence
  Description of Artificial Sequence: Synthetic oligonucleotide
gagctcactgaacgctggca

SEQ ID NO: 192 - DNA, 20 bp, Artificial Sequence
  Description of Artificial Sequence: Synthetic oligonucleotide
gaccctcagccgtgctgctc

SEQ ID NO: 193 - DNA, 20 bp, Artificial Sequence
  Description of Artificial Sequence: Synthetic oligonucleotide
gctgactcagagaccctgag

SEQ ID NO: 194 - DNA, 20 bp, Artificial Sequence
  Description of Artificial Sequence: Synthetic oligonucleotide
ggggctcaacatcggaagag

SEQ ID NO: 195 - DNA, 20 bp, Artificial Sequence
  Description of Artificial Sequence: Synthetic oligonucleotide
gctggctcaggttcaggaga

SEQ ID NO: 196 - DNA, 20 bp, Artificial Sequence
  Description of Artificial Sequence: Synthetic oligonucleotide
gtcatcttagtcattacctg

SEQ ID NO: 197 - DNA, 20 bp, Artificial Sequence
  Description of Artificial Sequence: Synthetic oligonucleotide
gaggacgtgtgtgtctgtgt

SEQ ID NO: 198 - DNA, 20 bp, Artificial Sequence
  Description of Artificial Sequence: Synthetic oligonucleotide
gaacacaatgcatagattgc

SEQ ID NO: 199 - DNA, 20 bp, Artificial Sequence
  Description of Artificial Sequence: Synthetic oligonucleotide
aaacataaagcatagactgc

SEQ ID NO: 200 - DNA, 20 bp, Artificial Sequence
  Description of Artificial Sequence: Synthetic oligonucleotide
cacccagactgagcacgtgc

SEQ ID NO: 201 - DNA, 20 bp, Artificial Sequence
  Description of Artificial Sequence: Synthetic oligonucleotide
gacacagactgggcacgtga

SEQ ID NO: 202 - DNA, 20 bp, Artificial Sequence
  Description of Artificial Sequence: Synthetic oligonucleotide
agctcagactgagcaagtga

SEQ ID NO: 203 - DNA, 20 bp, Artificial Sequence
  Description of Artificial Sequence: Synthetic oligonucleotide
agaccagactgagcaagaga

SEQ ID NO: 204 - DNA, 20 bp, Artificial Sequence
  Description of Artificial Sequence: Synthetic oligonucleotide
gagccagaatgagcacgtga

SEQ ID NO: 205 - DNA, 20 bp, Artificial Sequence
  Description of Artificial Sequence: Synthetic oligonucleotide
tgcactgcggccggaggagg

SEQ ID NO: 206 - DNA, 20 bp, Artificial Sequence
  Description of Artificial Sequence: Synthetic oligonucleotide
ggctctgcggctggaggggg

SEQ ID NO: 207 - DNA, 20 bp, Artificial Sequence
  Description of Artificial Sequence: Synthetic oligonucleotide
ggcacgacggctggaggtgg

SEQ ID NO: 208 - DNA, 20 bp, Artificial Sequence
  Description of Artificial Sequence: Synthetic oligonucleotide
ggcatcacggctggaggtgg

SEQ ID NO: 209 - DNA, 20 bp, Artificial Sequence
  Description of Artificial Sequence: Synthetic oligonucleotide
ggcgctgcggcgggaggtgg

SEQ ID NO: 210 - DNA, 20 bp, Artificial Sequence
  Description of Artificial Sequence: Synthetic oligonucleotide
gagtctaagcagaagaagaa

SEQ ID NO: 211 - DNA, 20 bp, Artificial Sequence
  Description of Artificial Sequence: Synthetic oligonucleotide
gaggccgagcagaagaaaga

SEQ ID NO: 212 - DNA, 20 bp, Artificial Sequence
  Description of Artificial Sequence: Synthetic oligonucleotide
gagtcctagcaggagaagaa

SEQ ID NO: 213 - DNA, 20 bp, Artificial Sequence
  Description of Artificial Sequence: Synthetic oligonucleotide
gagtccgggaaggagaagaa

SEQ ID NO: 214 - DNA, 20 bp, Artificial Sequence
  Description of Artificial Sequence: Synthetic oligonucleotide
gagccggagcagaagaagga

SEQ ID NO: 215 - DNA, 20 bp, Artificial Sequence
  Description of Artificial Sequence: Synthetic oligonucleotide
ggaaccccgtctgcagcacc

SEQ ID NO: 216 - DNA, 20 bp, Artificial Sequence
  Description of Artificial Sequence: Synthetic oligonucleotide
ggagtccctcctacagcacc

SEQ ID NO: 217 - DNA, 20 bp, Artificial Sequence
  Description of Artificial Sequence: Synthetic oligonucleotide
agaggcccctctgcagcacc

SEQ ID NO: 218 - DNA, 20 bp, Artificial Sequence
  Description of Artificial Sequence: Synthetic oligonucleotide
accatccctcctgcagcacc

SEQ ID NO: 219 - DNA, 20 bp, Artificial Sequence
  Description of Artificial Sequence: Synthetic oligonucleotide
ggattgccatccgcagcacc

SEQ ID NO: 220 - DNA, 20 bp, Artificial Sequence
  Description of Artificial Sequence: Synthetic oligonucleotide
tgaatcccatctccagcacc

SEQ ID NO: 221 - protein, 7 aa, Simian virus 40
PKKKRRV

SEQ ID NO: 222 - protein, 16 aa, Unknown
  Description of Unknown: nucleoplasmin NLS sequence
KRPAATKKAGQAKKKK

SEQ ID NO: 223 - protein, 1877 aa, Artificial Sequence
  Description of Artificial Sequence: Synthetic polypeptide
MKRTADGSEFESPKKKRKVSEVEFSHEYWMRHALTLAKRARDEREVPVGAVLVLNNRVIGEGWNRAIGLHDPTAHAEIMALRQGGLVMQNYRLIDATLYGTFEPCVMCAGAMIHSRIGRVVFGVRNAKTGAAGSLMDVLHYPGMNHRVEITEGILADECAALLCYFFRMPRQVFNAQKKAQSSTDSGGSSGGSSGSETPGTSESATPESSGGSSGGSDKKYSIGLAIGTNSVGWAVITDEYKVPSKKFKVLGNTDRHSIKKNLIGALLFDSGETAEATRLKRTARRRYTRRKNRICYLQEIFSNEMAKVDDSFFHRLEESFLVEEDKKHERHPIFGNIVDEVAYHEKYPTIYHLRKKLVDSTDKADLRLIYLALAHMIKFRGHFLIEGDLNPDNSDVDKLFIQLVQTYNQLFEENPINASGVDAKAILSARLSKSRRLENLIAQLPGEKKNGLFGNLIALSLGLTPNFKSNFDLAEDAKLQLSKDTYDDDLDNLLAQIGDQYADLFLAAKNLSDAILLSDILRVNTEITKAPLSASMIKRYDEHHQDLTLLKALVRQQLPEKYKEIFFDQSKNGYAGYIDGGASQEEFYKFIKPILEKMDGTEELLVKLNREDLLRKQRTFDNGSIPHQIHLGELHAILRRQEDFYPFLKDNREKIEKILTFRIPYYVGPLARGNSRFAWMTRKSEETITPWNFEEVVDKGASAQSFIERMTNFDKNLPNEKVLPKHSLLYEYFTVYNELTKVKYVTEGMRKPAFLSGEQKKAIVDLLFKTNRKVTVKQLKEDYFKKIECFDSVEISGVEDRFNASLGTYHDLLKIIKDKDFLDNEENEDILEDIVLTLTLFEDREMIEERLKTYAHLFDDKVMKQLKRRRYTGWGRLSRKLINGIRDKQSGKTILDFLKSDGFANRNFMQLIHDDSLTFKEDIQKAQVSGQGDSLHEHIANLAGSPAIKKGILQTVKVVDELVKVMGRHKPENIVIEMARENQTTQKGQKNSRERMKRIEEGIKELGSQILKEHPVENTQLQNEKLYLYYLQNGRDMYVDQELDINRLSDYDVDHIVPQSFLKDDSIDNKVLTRSDKNRGKSDNVPSEEVVKKMKNYWRQLLNAKLITQRKFDNLTKAERGGLSELDKAGFIKRQLVETRQITKHVAQILDSRMNTKYDENDKLIREVKVITLKSKLVSDFRKDFQFYKVREINNYHHAHDAYLNAVVGTALIKKYPKLESEFVYGDYKVYDVRKMIAKSEQEIGKATAKYFFYSNIMNFFKTEITLANGEIRKRPLIETNGETGEIVWDKGRDFATVRKVLSMPQVNIVKKTEVQTGGFSKESILPKRNSDKLIARKKDWDPKKYGGFDSPTVAYSVLVVAKVEKGKSKKLKSVKELLGITIMERSSFEKNPIDFLEAKGYKEVKKDLIIKLPKYSLFELENGRKRMLASAGELQKGNELALPSKYVNFLYLASHYEKLKGSPEDNEQKQLFVEQHKHYLDEIIEQISEFSKRVILADANLDKVLSAYNKHRDKPIREQAENIIHLFTLTNLGAPAAFKYFDTTIDRKRYTSTKEVLDATLIHQSITGLYETRIDLSQLGGDSGGSKRTADGSEFEPKKKRKVGSGATNFSLLKQAGDVEENPGPMVSKGEELFTGVVPILVELDGDVNGHKFSVSGEGEGDATYGKLTLKFICTTGKLPVPWPTLVTTLTYGVQCFSRYPDHMKQHDFFKSAMPEGYVQERTIFFKDDGNYKTRAEVKFEGDTLVNRIELKGIDFKEDGNILGHKLEYNYNSHNVYIMADKQKNGIKVNFKIRHNIEDGSVQLADHYQQNTPIGDGPVLLPDNHYLSTQSALSKDPNEKRDHMVLLEFVTAAGITLGMDELYKSGGSPKKKRKV

SEQ ID NO: 224 - protein, 1877 aa, Artificial Sequence
  Description of Artificial Sequence: Synthetic polypeptide
MKRTADGSEFESPKKKRKVSEVEFSHEYWMRHALTLAAAARDEREVPVGAVLVLNNRVIGEGWNRAIGLHDPTAHAEIMALRQGGLVMQNYRLIDATLYVTFEPCVMCAGAMIHSRIGRVVFGVRNAKTGAAGSLMDVLHYPGMNHRVEITEGILADECAALLCYFFRMPRQVFNAQKKAQSSTDSGGSSGGSSGSETPGTSESATPESSGGSSGGSDKKYSIGLAIGTNSVGWAVITDEYKVPSKKFKVLGNTDRHSIKKNLIGALLFDSGETAEATRLKRTARRRYTRRKNRICYLQEIFSNEMAKVDDSFFHRLEESFLVEEDKKHERHPIFGNIVDEVAYHEKYPTIYHLRKKLVDSTDKADLRLIYLALAHMIKFRGHFLIEGDLNPDNSDVDKLFIQLVQTYNQLFEENPINASGVDAKAILSARLSKSRRLENLIAQLPGEKKNGLFGNLIALSLGLTPNFKSNFDLAEDAKLQLSKDTYDDDLDNLLAQIGDQYADLFLAAKNLSDAILLSDILRVNTEITKAPLSASMIKRYDEHHQDLTLLKALVRQQLPEKYKEIFFDQSKNGYAGYIDGGASQEEFYKFIKPILEKMDGTEELLVKLNREDLLRKQRTFDNGSIPHQIHLGELHAILRRQEDFYPFLKDNREKIEKILTFRIPYYVGPLARGNSRFAWMTRKSEETITPWNFEEVVDKGASAQSFIERMTNFDKNLPNEKVLPKHSLLYEYFTVYNELTKVKYVTEGMRKPAFLSGEQKKAIVDLLFKTNRKVTVKQLKEDYFKKIECFDSVEISGVEDRFNASLGTYHDLLKIIKDKDFLDNEENEDILEDIVLTLTLFEDREMIEERLKTYAHLFDDKVMKQLKRRRYTGWGRLSRKLINGIRDKQSGKTILDFLKSDGFANRNFMQLIHDDSLTFKEDIQKAQVSGQGDSLHEHIANLAGSPAIKKGILQTVKVVDELVKVMGRHKPENIVIEMARENQTTQKGQKNSRERMKRIEEGIKELGSQILKEHPVENTQLQNEKLYLYYLQNGRDMYVDQELDINRLSDYDVDHIVPQSFLKDDSIDNKVLTRSDKNRGKSDNVPSEEVVKKMKNYWRQLLNAKLITQRKFDNLTKAERGGLSELDKAGFIKRQLVETRQITKHVAQILDSRMNTKYDENDKLIREVKVITLKSKLVSDFRKDFQFYKVREINNYHHAHDAYLNAVVGTALIKKYPKLESEFVYGDYKVYDVRKMIAKSEQEIGKATAKYFFYSNIMNFFKTEITLANGEIRKRPLIETNGETGEIVWDKGRDFATVRKVLSMPQVNIVKKTEVQTGGFSKESILPKRNSDKLIARKKDWDPKKYGGFDSPTVAYSVLVVAKVEKGKSKKLKSVKELLGITIMERSSFEKNPIDFLEAKGYKEVKKDLIIKLPKYSLFELENGRKRMLASAGELQKGNELALPSKYVNFLYLASHYEKLKGSPEDNEQKQLFVEQHKHYLDEIIEQISEFSKRVILADANLDKVLSAYNKHRDKPIREQAENIIHLFTLTNLGAPAAFKYFDTTIDRKRYTSTKEVLDATLIHQSITGLYETRIDLSQLGGDSGGSKRTADGSEFEPKKKRKVGSGATNFSLLKQAGDVEENPGPMVSKGEELFTGVVPILVELDGDVNGHKFSVSGEGEGDATYGKLTLKFICTTGKLPVPWPTLVTTLTYGVQCFSRYPDHMKQHDFFKSAMPEGYVQERTIFFKDDGNYKTRAEVKFEGDTLVNRIELKGIDFKEDGNILGHKLEYNYNSHNVYIMADKQKNGIKVNFKIRHNIEDGSVQLADHYQQNTPIGDGPVLLPDNHYLSTQSALSKDPNEKRDHMVLLEFVTAAGITLGMDELYKSGGSPKKKRKV

SEQ ID NO: 225 - protein, 1877 aa, Artificial Sequence
  Description of Artificial Sequence: Synthetic polypeptide
MKRTADGSEFESPKKKRKVSEVEFSHEYWMRHALTLAKRARDEREVPVGAVLVLNNRVIGEGWNRAIGLHDPTAHAEIMALRQGGLVMQNYRLIDATLYVTFEPCVMCAGAMIHSRIGRVVFGWRNAKTGAAGSLMDVLHYPGMNHRVEITEGILADECAALLCYFFRMPRQVFNAQKKAQSSTDSGGSSGGSSGSETPGTSESATPESSGGSSGGSDKKYSIGLAIGTNSVGWAVITDEYKVPSKKFKVLGNTDRHSIKKNLIGALLFDSGETAEATRLKRTARRRYTRRKNRICYLQEIFSNEMAKVDDSFFHRLEESFLVEEDKKHERHPIFGNIVDEVAYHEKYPTIYHLRKKLVDSTDKADLRLIYLALAHMIKFRGHFLIEGDLNPDNSDVDKLFIQLVQTYNQLFEENPINASGVDAKAILSARLSKSRRLENLIAQLPGEKKNGLFGNLIALSLGLTPNFKSNFDLAEDAKLQLSKDTYDDDLDNLLAQIGDQYADLFLAAKNLSDAILLSDILRVNTEITKAPLSASMIKRYDEHHQDLTLLKALVRQQLPEKYKEIFFDQSKNGYAGYIDGGASQEEFYKFIKPILEKMDGTEELLVKLNREDLLRKQRTFDNGSIPHQIHLGELHAILRRQEDFYPFLKDNREKIEKILTFRIPYYVGPLARGNSRFAWMTRKSEETITPWNFEEVVDKGASAQSFIERMTNFDKNLPNEKVLPKHSLLYEYFTVYNELTKVKYVTEGMRKPAFLSGEQKKAIVDLLFKTNRKVTVKQLKEDYFKKIECFDSVEISGVEDRFNASLGTYHDLLKIIKDKDFLDNEENEDILEDIVLTLTLFEDREMIEERLKTYAHLFDDKVMKQLKRRRYTGWGRLSRKLINGIRDKQSGKTILDFLKSDGFANRNFMQLIHDDSLTFKEDIQKAQVSGQGDSLHEHIANLAGSPAIKKGILQTVKVVDELVKVMGRHKPENIVIEMARENQTTQKGQKNSRERMKRIEEGIKELGSQILKEHPVENTQLQNEKLYLYYLQNGRDMYVDQELDINRLSDYDVDHIVPQSFLKDDSIDNKVLTRSDKNRGKSDNVPSEEVVKKMKNYWRQLLNAKLITQRKFDNLTKAERGGLSELDKAGFIKRQLVETRQITKHVAQILDSRMNTKYDENDKLIREVKVITLKSKLVSDFRKDFQFYKVREINNYHHAHDAYLNAVVGTALIKKYPKLESEFVYGDYKVYDVRKMIAKSEQEIGKATAKYFFYSNIMNFFKTEITLANGEIRKRPLIETNGETGEIVWDKGRDFATVRKVLSMPQVNIVKKTEVQTGGFSKESILPKRNSDKLIARKKDWDPKKYGGFDSPTVAYSVLVVAKVEKGKSKKLKSVKELLGITIMERSSFEKNPIDFLEAKGYKEVKKDLIIKLPKYSLFELENGRKRMLASAGELQKGNELALPSKYVNFLYLASHYEKLKGSPEDNEQKQLFVEQHKHYLDEIIEQISEFSKRVILADANLDKVLSAYNKHRDKPIREQAENIIHLFTLTNLGAPAAFKYFDTTIDRKRYTSTKEVLDATLIHQSITGLYETRIDLSQLGGDSGGSKRTADGSEFEPKKKRKVGSGATNFSLLKQAGDVEENPGPMVSKGEELFTGVVPILVELDGDVNGHKFSVSGEGEGDATYGKLTLKFICTTGKLPVPWPTLVTTLTYGVQCFSRYPDHMKQHDFFKSAMPEGYVQERTIFFKDDGNYKTRAEVKFEGDTLVNRIELKGIDFKEDGNILGHKLEYNYNSHNVYIMADKQKNGIKVNFKIRHNIEDGSVQLADHYQQNTPIGDGPVLLPDNHYLSTQSALSKDPNEKRDHMVLLEFVTAAGITLGMDELYKSGGSPKKKRKV

SEQ ID NO: 226 - protein, 166 aa, Artificial Sequence
  Description of Artificial Sequence: Synthetic polypeptide
SEVEFSHEYWMRHALTLAKRARDEREVPVGAVLVLNNRVIGEGWNRAIGLHDPTAHAEIMALRQGGLVMQNYRLIDATLYVTFEPCVMCAGAMIHSRIGRVVFGVRNAKTGAAGSLMDVLHYPGMNHRVEITEGILADECAALLCYFFRMPRQVFNAQKKAQSSTD

SEQ ID NO: 227 - protein, 365 aa, Artificial Sequence
  Description of Artificial Sequence: Synthetic polypeptide
MSEVEFSHEYWMRHALTLAKRAWDEREVPVGAVLVHNNRVIGEGWNRPIGRHDPTAHAEIMALRQGGLVMQNYRLIDATLYVTLEPCVMCAGAMIHSRIGRVVFGARDAKTGAAGSLMDVLHHPGMNHRVEITEGILADECAALLSDFFRMRRQEIKAQKKAQSSTDSGGSSGGSSGSETPGTSESATPESSGGSSGGSSEVEFSHEYWMRHALTLAKRARDEREVPVGAVLVLNNRVIGEGWNRAIGLHDPTAHAEIMALRQGGLVMQNYRLIDATLYVTFEPCVMCAGAMIHSRIGRVVFGVRNAKTGAAGSLMDVLHYPGMNHRVEITEGILADECAALLCYFFRMPRQVFNAQKKAQSSTD

SEQ ID NO: 228 - protein, 1803 aa, Artificial Sequence
  Description of Artificial Sequence: Synthetic polypeptide
MKRTADGSEFESPKKKRKVSEVEFSHEYWMRHALTLAKRAWDEREVPVGAVLVHNNRVIGEGWNRPIGRHDPTAHAEIMALRQGGLVMQNYRLIDATLYVTLEPCVMCAGAMIHSRIGRVVFGARDAKTGAAGSLMDVLHHPGMNHRVEITEGILADECAALLSDFFRMRRQEIKAQKKAQSSTDSGGSSGGSSGSETPGTSESATPESSGGSSGGSSEVEFSHEYWMRHALTLAKRARDEREVPVGAVLVLNNRVIGEGWNRAIGLHDPTAHAEIMALRQGGLVMQNYRLIDATLYVTFEPCVMCAGAMIHSRIGRVVFGVRNAKTGAAGSLMDVLHYPGMNHRVEITEGILADECAALLCYFFRMPRQVFNAQKKAQSSTDSGGSSGGSSGSETPGTSESATPESSGGSSGGSDKKYSIGLAIGTNSVGWAVITDEYKVPSKKFKVLGNTDRHSIKKNLIGALLFDSGETAEATRLKRTARRRYTRRKNRICYLQEIFSNEMAKVDDSFFHRLEESFLVEEDKKHERHPIFGNIVDEVAYHEKYPTIYHLRKKLVDSTDKADLRLIYLALAHMIKFRGHFLIEGDLNPDNSDVDKLFIQLVQTYNQLFEENPINASGVDAKAILSARLSKSRRLENLIAQLPGEKKNGLFGNLIALSLGLTPNFKSNFDLAEDAKLQLSKDTYDDDLDNLLAQIGDQYADLFLAAKNLSDAILLSDILRVNTEITKAPLSASMIKRYDEHHQDLTLLKALVRQQLPEKYKEIFFDQSKNGYAGYIDGGASQEEFYKFIKPILEKMDGTEELLVKLNREDLLRKQRTFDNGSIPHQIHLGELHAILRRQEDFYPFLKDNREKIEKILTFRIPYYVGPLARGNSRFAWMTRKSEETITPWNFEEVVDKGASAQSFIERMTNFDKNLPNEKVLPKHSLLYEYFTVYNELTKVKYVTEGMRKPAFLSGEQKKAIVDLLFKTNRKVTVKQLKEDYFKKIECFDSVEISGVEDRFNASLGTYHDLLKIIKDKDFLDNEENEDILEDIVLTLTLFEDREMIEERLKTYAHLFDDKVMKQLKRRRYTGWGRLSRKLINGIRDKQSGKTILDFLKSDGFANRNFMQLIHDDSLTFKEDIQKAQVSGQGDSLHEHIANLAGSPAIKKGILQTVKVVDELVKVMGRHKPENIVIEMARENQTTQKGQKNSRERMKRIEEGIKELGSQILKEHPVENTQLQNEKLYLYYLQNGRDMYVDQELDINRLSDYDVDHIVPQSFLKDDSIDNKVLTRSDKNRGKSDNVPSEEVVKKMKNYWRQLLNAKLITQRKFDNLTKAERGGLSELDKAGFIKRQLVETRQITKHVAQILDSRMNTKYDENDKLIREVKVITLKSKLVSDFRKDFQFYKVREINNYHHAHDAYLNAVVGTALIKKYPKLESEFVYGDYKVYDVRKMIAKSEQEIGKATAKYFFYSNIMNFFKTEITLANGEIRKRPLIETNGETGEIVWDKGRDFATVRKVLSMPQVNIVKKTEVQTGGFSKESILPKRNSDKLIARKKDWDPKKYGGFDSPTVAYSVLVVAKVEKGKSKKLKSVKELLGITIMERSSFEKNPIDFLEAKGYKEVKKDLIIKLPKYSLFELENGRKRMLASAGELQKGNELALPSKYVNFLYLASHYEKLKGSPEDNEQKQLFVEQHKHYLDEIIEQISEFSKRVILADANLDKVLSAYNKHRDKPIREQAENIIHLFTLTNLGAPAAFKYFDTTIDRKRYTSTKEVLDATLIHQSITGLYETRIDLSQLGGDSGGSKRTADGSEFEPKKKRKV

SEQ ID NO: 229 - protein, 17 aa, Unknown
  Description of Unknown: bipartite NLS sequence
KRTADGSEFEPKKKRKV

SEQ ID NO: 230 - protein, 83 aa, Bacillus phage PBS2
TNLSDIIEKETGKQLVIQESILMLPEEVEEVIGNKPESDILVHTAYDESTDENVMLLTSDAPEYKPWALVIQDSNGENKIKML

SEQ ID NO: 231 - protein, 18 aa, Unknown
  Description of Unknown: bipartite NLS sequence
KRTADGSEFESPKKKRKV

SEQ ID NO: 232 - protein, 4 aa, Artificial Sequence
  Description of Artificial Sequence: Synthetic peptide
  See specification as filed for detailed description of substitutions and preferred embodiments
GGGS

SEQ ID NO: 233 - protein, 5 aa, Artificial Sequence
  Description of Artificial Sequence: Synthetic peptide
  See specification as filed for detailed description of substitutions and preferred embodiments
GGGGS

SEQ ID NO: 234 - protein, 4 aa, Artificial Sequence
  Description of Artificial Sequence: Synthetic peptide
  See specification as filed for detailed description of substitutions and preferred embodiments
GGGS

SEQ ID NO: 235 - protein, 5 aa, Artificial Sequence
  Description of Artificial Sequence: Synthetic peptide
  See specification as filed for detailed description of substitutions and preferred embodiments
GGGGS

SEQ ID NO: 236 - protein, 6 aa, Artificial Sequence
  Description of Artificial Sequence: Synthetic 6xHis tag
HHHHHH

SEQ ID NO: 237 - DNA, 18 bp, Artificial Sequence
  Description of Artificial Sequence: Synthetic oligonucleotide
tggttctggccctgctgg

SEQ ID NO: 238 - DNA, 17 bp, Artificial Sequence
  Description of Artificial Sequence: Synthetic oligonucleotide
tggttctggccctgctg

SEQ ID NO: 239 - DNA, 16 bp, Artificial Sequence
  Description of Artificial Sequence: Synthetic oligonucleotide
tgtcccgcctgtcctg

SEQ ID NO: 240 - DNA, 18 bp, Artificial Sequence
  Description of Artificial Sequence: Synthetic oligonucleotide
tgaataaataatttttcg

SEQ ID NO: 241 - DNA, 18 bp, Artificial Sequence
  Description of Artificial Sequence: Synthetic oligonucleotide
tgtcatttattctttcaa

SEQ ID NO: 242 - DNA, 17 bp, Artificial Sequence
  Description of Artificial Sequence: Synthetic oligonucleotide
tgtttcaatgtttaaga

SEQ ID NO: 243 - DNA, 16 bp, Artificial Sequence
  Description of Artificial Sequence: Synthetic oligonucleotide
tgtttcaatgtttaag

SEQ ID NO: 244 - DNA, 17 bp, Artificial Sequence
  Description of Artificial Sequence: Synthetic oligonucleotide
ggtccaggtgctgatgg

SEQ ID NO: 245 - DNA, 16 bp, Artificial Sequence
  Description of Artificial Sequence: Synthetic oligonucleotide
ggtccaggtgctgatg

SEQ ID NO: 246 - DNA, 17 bp, Artificial Sequence
  Description of Artificial Sequence: Synthetic oligonucleotide
tggcgtctgtaggaagg

SEQ ID NO: 247 - DNA, 16 bp, Artificial Sequence
  Description of Artificial Sequence: Synthetic oligonucleotide
tggcgtctgtaggaag

SEQ ID NO: 248 - DNA, 18 bp, Artificial Sequence
  Description of Artificial Sequence: Synthetic oligonucleotide
tgcactcactctggcctg

SEQ ID NO: 249 - DNA, 18 bp, Artificial Sequence
  Description of Artificial Sequence: Synthetic oligonucleotide
tgtttatgctttaaaagg

SEQ ID NO: 250 - DNA, 17 bp, Artificial Sequence
  Description of Artificial Sequence: Synthetic oligonucleotide
tgtttatgctttaaaag

SEQ ID NO: 251 - DNA, 18 bp, Artificial Sequence
  Description of Artificial Sequence: Synthetic oligonucleotide
tgtacctgactttggagg

SEQ ID NO: 252 - DNA, 17 bp, Artificial Sequence
  Description of Artificial Sequence: Synthetic oligonucleotide
tgtacctgactttggag

SEQ ID NO: 253 - DNA, 17 bp, Artificial Sequence
  Description of Artificial Sequence: Synthetic oligonucleotide
tgccatgcgcttctcga

SEQ ID NO: 254 - DNA, 16 bp, Artificial Sequence
  Description of Artificial Sequence: Synthetic oligonucleotide
tgccatgcgcttctcg

SEQ ID NO: 255 - DNA, 18 bp, Artificial Sequence
  Description of Artificial Sequence: Synthetic oligonucleotide
gtgtgaccgggaatatga

SEQ ID NO: 256 - DNA, 17 bp, Artificial Sequence
  Description of Artificial Sequence: Synthetic oligonucleotide
gtgtgaccgggaatatg

SEQ ID NO: 257 - DNA, 18 bp, Artificial Sequence
  Description of Artificial Sequence: Synthetic oligonucleotide
tgtcttcctcgtgctctg

SEQ ID NO: 258 - DNA, 17 bp, Artificial Sequence
  Description of Artificial Sequence: Synthetic oligonucleotide
tgggatgaagaaataga

SEQ ID NO: 259 - DNA, 16 bp, Artificial Sequence
  Description of Artificial Sequence: Synthetic oligonucleotide
tgggatgaagaaatag

SEQ ID NO: 260 - DNA, 18 bp, Artificial Sequence
  Description of Artificial Sequence: Synthetic oligonucleotide
tgggatgaagaaatagaa

SEQ ID NO: 261 - DNA, 17 bp, Artificial Sequence
  Description of Artificial Sequence: Synthetic oligonucleotide
tgtcgcgaaggacctgg

SEQ ID NO: 262 - DNA, 16 bp, Artificial Sequence
  Description of Artificial Sequence: Synthetic oligonucleotide
tgtcgcgaaggacctg

SEQ ID NO: 263 - DNA, 18 bp, Artificial Sequence
  Description of Artificial Sequence: Synthetic oligonucleotide
tgcctctgggacgctcag

SEQ ID NO: 264 - DNA, 18 bp, Artificial Sequence
  Description of Artificial Sequence: Synthetic oligonucleotide
tgtgatgtcaacaaaagg

SEQ ID NO: 265 - DNA, 17 bp, Artificial Sequence
  Description of Artificial Sequence: Synthetic oligonucleotide
tgtgatgtcaacaaaag

SEQ ID NO: 266 - DNA, 16 bp, Artificial Sequence
  Description of Artificial Sequence: Synthetic oligonucleotide
tgagagctcagtggag

SEQ ID NO: 267 - DNA, 20 bp, Artificial Sequence
  Description of Artificial Sequence: Synthetic oligonucleotide
tggacacaccgtggtaaaga

SEQ ID NO: 268 - DNA, 19 bp, Artificial Sequence
  Description of Artificial Sequence: Synthetic oligonucleotide
tggacacaccgtggtaaag

SEQ ID NO: 269 - DNA, 17 bp, Artificial Sequence
  Description of Artificial Sequence: Synthetic oligonucleotide
tggacacaccgtggtaa

SEQ ID NO: 270 - DNA, 19 bp, Artificial Sequence
  Description of Artificial Sequence: Synthetic oligonucleotide
tgggatgccttgcttctga

SEQ ID NO: 271 - DNA, 18 bp, Artificial Sequence
  Description of Artificial Sequence: Synthetic oligonucleotide
tgggatgccttgcttctg

SEQ ID NO: 272 - DNA, 17 bp, Artificial Sequence
  Description of Artificial Sequence: Synthetic oligonucleotide
tgtcgcgaaggacctgg

SEQ ID NO: 273 - DNA, 16 bp, Artificial Sequence
  Description of Artificial Sequence: Synthetic oligonucleotide
tgtcgcgaaggacctg

SEQ ID NO: 274 - DNA, 20 bp, Artificial Sequence
  Description of Artificial Sequence: Synthetic oligonucleotide
tgctgcggggggacctgcgg

SEQ ID NO: 275 - DNA, 17 bp, Artificial Sequence
  Description of Artificial Sequence: Synthetic oligonucleotide
tgctgcggggggacctg

SEQ ID NO: 276 - DNA, 18 bp, Artificial Sequence
  Description of Artificial Sequence: Synthetic oligonucleotide
gcctggccgacagtcaag

SEQ ID NO: 277 - DNA, 17 bp, Artificial Sequence
  Description of Artificial Sequence: Synthetic oligonucleotide
gcctggccgacagtcaa

SEQ ID NO: 278 - DNA, 17 bp, Artificial Sequence
  Description of Artificial Sequence: Synthetic oligonucleotide
tggaggaggcggccaga

SEQ ID NO: 279 - DNA, 16 bp, Artificial Sequence
  Description of Artificial Sequence: Synthetic oligonucleotide
tggaggaggcggccag

SEQ ID NO: 280 - DNA, 18 bp, Artificial Sequence
  Description of Artificial Sequence: Synthetic oligonucleotide
tggaggaggcggccagaa

SEQ ID NO: 281 - DNA, 19 bp, Artificial Sequence
  Description of Artificial Sequence: Synthetic oligonucleotide
tgacagtgaggaggaacaa

SEQ ID NO: 282 - DNA, 18 bp, Artificial Sequence
  Description of Artificial Sequence: Synthetic oligonucleotide
tgcgcctggagactacag

SEQ ID NO: 283 - DNA, 18 bp, Artificial Sequence
  Description of Artificial Sequence: Synthetic oligonucleotide
tgcctttggactgaaagg

SEQ ID NO: 284 - DNA, 17 bp, Artificial Sequence
  Description of Artificial Sequence: Synthetic oligonucleotide
tgcctttggactgaaag

SEQ ID NO: 285 - DNA, 17 bp, Artificial Sequence
  Description of Artificial Sequence: Synthetic oligonucleotide
gtaccagatcccacaga

SEQ ID NO: 286 - DNA, 16 bp, Artificial Sequence
  Description of Artificial Sequence: Synthetic oligonucleotide
gtaccagatcccacag

SEQ ID NO: 287 - DNA, 20 bp, Artificial Sequence
  Description of Artificial Sequence: Synthetic oligonucleotide
gatgaagccttaaataaaga

SEQ ID NO: 288 - DNA, 19 bp, Artificial Sequence
  Description of Artificial Sequence: Synthetic oligonucleotide
gatgaagccttaaataaag

SEQ ID NO: 289 - DNA, 17 bp, Artificial Sequence
  Description of Artificial Sequence: Synthetic oligonucleotide
gatgaagccttaaataa

SEQ ID NO: 290 - DNA, 17 bp, Artificial Sequence
  Description of Artificial Sequence: Synthetic oligonucleotide
gtttatcagcaaggaga

SEQ ID NO: 291 - DNA, 16 bp, Artificial Sequence
  Description of Artificial Sequence: Synthetic oligonucleotide
gtttatcagcaaggag

SEQ ID NO: 292 - DNA, 19 bp, Artificial Sequence
  Description of Artificial Sequence: Synthetic oligonucleotide
tggcaacacctgctccatg

SEQ ID NO: 293 - DNA, 17 bp, Artificial Sequence
  Description of Artificial Sequence: Synthetic oligonucleotide
tgtgtcgtggattgtgg

SEQ ID NO: 294 - DNA, 16 bp, Artificial Sequence
  Description of Artificial Sequence: Synthetic oligonucleotide
tgtgtcgtggattgtg

SEQ ID NO: 295 - DNA, 17 bp, Artificial Sequence
  Description of Artificial Sequence: Synthetic oligonucleotide
tgagagagacgcggagg

SEQ ID NO: 296 - DNA, 16 bp, Artificial Sequence
  Description of Artificial Sequence: Synthetic oligonucleotide
tgagagagacgcggag

SEQ ID NO: 297 - DNA, 20 bp, Artificial Sequence
  Description of Artificial Sequence: Synthetic oligonucleotide
gttggacgacctttgaatgg

SEQ ID NO: 298 - DNA, 19 bp, Artificial Sequence
  Description of Artificial Sequence: Synthetic oligonucleotide
gttggacgacctttgaatg

SEQ ID NO: 299 - DNA, 17 bp, Artificial Sequence
  Description of Artificial Sequence: Synthetic oligonucleotide
gttggacgacctttgaa

SEQ ID NO: 300 - DNA, 17 bp, Artificial Sequence
  Description of Artificial Sequence: Synthetic oligonucleotide
tgaggctgggggtggaa

SEQ ID NO: 301 - DNA, 19 bp, Artificial Sequence
  Description of Artificial Sequence: Synthetic oligonucleotide
gtcctagaccagtgcccgg

SEQ ID NO: 302 - DNA, 18 bp, Artificial Sequence
  Description of Artificial Sequence: Synthetic oligonucleotide
gtcctagaccagtgcccg

SEQ ID NO: 303 - DNA, 17 bp, Artificial Sequence
  Description of Artificial Sequence: Synthetic oligonucleotide
tgggaaatacgccctga

SEQ ID NO: 304 - DNA, 16 bp, Artificial Sequence
  Description of Artificial Sequence: Synthetic oligonucleotide
tgggaaatacgccctg

SEQ ID NO: 305 - DNA, 19 bp, Artificial Sequence
  Description of Artificial Sequence: Synthetic oligonucleotide
tgcttagtgcactggcaga

SEQ ID NO: 306 - DNA, 18 bp, Artificial Sequence
  Description of Artificial Sequence: Synthetic oligonucleotide
tgcttagtgcactggcag

SEQ ID NO: 307 - DNA, 18 bp, Artificial Sequence
  Description of Artificial Sequence: Synthetic oligonucleotide
tcggctcgccgcctgcag

SEQ ID NO: 308 - DNA, 17 bp, Artificial Sequence
  Description of Artificial Sequence: Synthetic oligonucleotide
tgccctgcgctgtgagg

SEQ ID NO: 309 - DNA, 16 bp, Artificial Sequence
  Description of Artificial Sequence: Synthetic oligonucleotide
tgccctgcgctgtgag

SEQ ID NO: 310 - DNA, 18 bp, Artificial Sequence
  Description of Artificial Sequence: Synthetic oligonucleotide
tggatttctggaagtaga

SEQ ID NO: 311 - DNA, 17 bp, Artificial Sequence
  Description of Artificial Sequence: Synthetic oligonucleotide
tggatttctggaagtag

SEQ ID NO: 312 - DNA, 17 bp, Artificial Sequence
  Description of Artificial Sequence: Synthetic oligonucleotide
ggttcttggtcctcagg

SEQ ID NO: 313 - DNA, 16 bp, Artificial Sequence
  Description of Artificial Sequence: Synthetic oligonucleotide
ggttcttggtcctcag

SEQ ID NO: 314 - DNA, 17 bp, Artificial Sequence
  Description of Artificial Sequence: Synthetic oligonucleotide
gtgtctgggatgctgaa

SEQ ID NO: 315 - DNA, 17 bp, Artificial Sequence
  Description of Artificial Sequence: Synthetic oligonucleotide
gtgcctgccccccagag

SEQ ID NO: 316 - DNA, 16 bp, Artificial Sequence
  Description of Artificial Sequence: Synthetic oligonucleotide
tggcaagtgcaacgtg

SEQ ID NO: 317 - DNA, 19 bp, Artificial Sequence
  Description of Artificial Sequence: Synthetic oligonucleotide
tgtggacaggtggcagcgg

SEQ ID NO: 318 - DNA, 16 bp, Artificial Sequence
  Description of Artificial Sequence: Synthetic oligonucleotide
tgtggacaggtggcag

SEQ ID NO: 319 - DNA, 20 bp, Artificial Sequence
  Description of Artificial Sequence: Synthetic oligonucleotide
tgctcctgtgctgagccagg

SEQ ID NO: 320 - DNA, 19 bp, Artificial Sequence
  Description of Artificial Sequence: Synthetic oligonucleotide
tgctcctgtgctgagccag

SEQ ID NO: 321 - DNA, 20 bp, Artificial Sequence
  Description of Artificial Sequence: Synthetic oligonucleotide
tgttgctattgaacacctgg

SEQ ID NO: 322 - DNA, 19 bp, Artificial Sequence
  Description of Artificial Sequence: Synthetic oligonucleotide
tgttgctattgaacacctg

SEQ ID NO: 323 - DNA, 17 bp, Artificial Sequence
  Description of Artificial Sequence: Synthetic oligonucleotide
tgcagagcaggcggccg

SEQ ID NO: 324 - DNA, 17 bp, Artificial Sequence
  Description of Artificial Sequence: Synthetic oligonucleotide
tgttctggtcaaggtga

SEQ ID NO: 325 - DNA, 16 bp, Artificial Sequence
  Description of Artificial Sequence: Synthetic oligonucleotide
tgttctggtcaaggtg

SEQ ID NO: 326 - DNA, 10 bp, Artificial Sequence
  Description of Artificial Sequence: Synthetic oligonucleotide
acacaaagca

SEQ ID NO: 327 - DNA, 11 bp, Artificial Sequence
  Description of Artificial Sequence: Synthetic oligonucleotide
tcaagaaagca

SEQ ID NO: 328 - DNA, 11 bp, Artificial Sequence
  Description of Artificial Sequence: Synthetic oligonucleotide
taaacaaagca

SEQ ID NO: 329 - DNA, 11 bp, Artificial Sequence
  Description of Artificial Sequence: Synthetic oligonucleotide
gacaggcagca

SEQ ID NO: 330 - DNA, 11 bp, Artificial Sequence
  Description of Artificial Sequence: Synthetic oligonucleotide
gctaaagacca

SEQ ID NO: 331 - DNA, 11 bp, Artificial Sequence
  Description of Artificial Sequence: Synthetic oligonucleotide
tctagaaagct

SEQ ID NO: 332 - DNA, 10 bp, Artificial Sequence
  Description of Artificial Sequence: Synthetic oligonucleotide
acacacacac

SEQ ID NO: 333 - DNA, 10 bp, Artificial Sequence
  Description of Artificial Sequence: Synthetic oligonucleotide
cacacacact

SEQ ID NO: 334 - DNA, 11 bp, Artificial Sequence
  Description of Artificial Sequence: Synthetic oligonucleotide
gaatcccttct

SEQ ID NO: 335 - DNA, 11 bp, Artificial Sequence
  Description of Artificial Sequence: Synthetic oligonucleotide
gcactgcggct

SEQ ID NO: 336 - DNA, 12 bp, Artificial Sequence
  Description of Artificial Sequence: Synthetic oligonucleotide
gcgtgacttcca

SEQ ID NO: 337 - DNA, 13 bp, Artificial Sequence
  Description of Artificial Sequence: Synthetic oligonucleotide
gcactcgggggcg

SEQ ID NO: 338 - DNA, 11 bp, Artificial Sequence
  Description of Artificial Sequence: Synthetic oligonucleotide
accctcagccg

SEQ ID NO: 339 - DNA, 12 bp, Artificial Sequence
  Description of Artificial Sequence: Synthetic oligonucleotide
gctgactcagag

SEQ ID NO: 340 - DNA, 11 bp, Artificial Sequence
  Description of Artificial Sequence: Synthetic oligonucleotide
gctcaacatcg

SEQ ID NO: 341 - DNA, 15 bp, Artificial Sequence
  Description of Artificial Sequence: Synthetic oligonucleotide
gctggctcaggttca

SEQ ID NO: 342 - DNA, 12 bp, Artificial Sequence
  Description of Artificial Sequence: Synthetic oligonucleotide
tcatcttagtca

SEQ ID NO: 343 - DNA, 13 bp, Artificial Sequence
  Description of Artificial Sequence: Synthetic oligonucleotide
gacgtgtgtgtct

SEQ ID NO: 344 - DNA, 23 bp, Artificial Sequence
  Description of Artificial Sequence: Synthetic oligonucleotide
ctggaacacaaagcatagactgc

SEQ ID NO: 345 - DNA, 23 bp, Artificial Sequence
  Description of Artificial Sequence: Synthetic oligonucleotide
ctggaacacaaagcatagactgc

SEQ ID NO: 346 - DNA, 20 bp, Artificial Sequence
  Description of Artificial Sequence: Synthetic oligonucleotide
gaacacaaagcatagactgc

SEQ ID NO: 347 - DNA, 20 bp, Artificial Sequence
  Description of Artificial Sequence: Synthetic oligonucleotide
gaatgcaaagcatagactgc

SEQ ID NO: 348 - DNA, 20 bp, Artificial Sequence
  Description of Artificial Sequence: Synthetic oligonucleotide
gaatgtgaagcatagactgc

SEQ ID NO: 349 - DNA, 20 bp, Artificial Sequence
  Description of Artificial Sequence: Synthetic oligonucleotide
gaacacaaagcatagactgc

SEQ ID NO: 350 - DNA, 20 bp, Artificial Sequence
  Description of Artificial Sequence: Synthetic oligonucleotide
gaatgtaaagcatagactgc

SEQ ID NO: 351 - DNA, 20 bp, Artificial Sequence
  Description of Artificial Sequence: Synthetic oligonucleotide
gaatgcgaagcatagactgc

SEQ ID NO: 352 - DNA, 20 bp, Artificial Sequence
  Description of Artificial Sequence: Synthetic oligonucleotide
gaatacaaagcatagactgc

SEQ ID NO: 353 - DNA, 20 bp, Artificial Sequence
  Description of Artificial Sequence: Synthetic oligonucleotide
gaacgcgaagcatagactgc

SEQ ID NO: 354 - DNA, 20 bp, Artificial Sequence
  Description of Artificial Sequence: Synthetic oligonucleotide
gaacgcaaagcatagactgc

SEQ ID NO: 355 - DNA, 20 bp, Artificial Sequence
  Description of Artificial Sequence: Synthetic oligonucleotide
gaatgcaaagtatagactgc

SEQ ID NO: 356 - DNA, 20 bp, Artificial Sequence
  Description of Artificial Sequence: Synthetic oligonucleotide
gaagacaaagcatagactgc

SEQ ID NO: 357 - DNA, 20 bp, Artificial Sequence
  Description of Artificial Sequence: Synthetic oligonucleotide
gagtatgaggcatagactgc

SEQ ID NO: 358 - DNA, 20 bp, Artificial Sequence
  Description of Artificial Sequence: Synthetic oligonucleotide
gagtatgaggcatagactgc

SEQ ID NO: 359 - DNA, 20 bp, Artificial Sequence
  Description of Artificial Sequence: Synthetic oligonucleotide
gagtgtgaggcatagactgc

SEQ ID NO: 360 - DNA, 20 bp, Artificial Sequence
  Description of Artificial Sequence: Synthetic oligonucleotide
gagtgtgaggtatagactgc

SEQ ID NO: 361 - DNA, 20 bp, Artificial Sequence
  Description of Artificial Sequence: Synthetic oligonucleotide
gagtgtggggcatagactgc

SEQ ID NO: 362 - DNA, 20 bp, Artificial Sequence
  Description of Artificial Sequence: Synthetic oligonucleotide
gtcaagaaagcagagactgc

SEQ ID NO: 363 - DNA, 20 bp, Artificial Sequence
  Description of Artificial Sequence: Synthetic oligonucleotide
gttaagaaagcagagactgc

SEQ ID NO: 364 - DNA, 20 bp, Artificial Sequence
  Description of Artificial Sequence: Synthetic oligonucleotide
gtcaagaaagcagagactgc

SEQ ID NO: 365 - DNA, 20 bp, Artificial Sequence
  Description of Artificial Sequence: Synthetic oligonucleotide
gttaggaaagcagagactgc

SEQ ID NO: 366 - DNA, 20 bp, Artificial Sequence
  Description of Artificial Sequence: Synthetic oligonucleotide
gttaagaaagtagagactgc

SEQ ID NO: 367 - DNA, 20 bp, Artificial Sequence
  Description of Artificial Sequence: Synthetic oligonucleotide
gttgggaaagcagagactgc

SEQ ID NO: 368 - DNA, 20 bp, Artificial Sequence
  Description of Artificial Sequence: Synthetic oligonucleotide
gttgagaaagcagagactgc

SEQ ID NO: 369 - DNA, 20 bp, Artificial Sequence
  Description of Artificial Sequence: Synthetic oligonucleotide
gttaaggaagcagagactgc

SEQ ID NO: 370 - DNA, 20 bp, Artificial Sequence
  Description of Artificial Sequence: Synthetic oligonucleotide
gagcaaagagaatagactgt

SEQ ID NO: 371 - DNA, 20 bp, Artificial Sequence
  Description of Artificial Sequence: Synthetic oligonucleotide
gagcaaagagaatagactgt

SEQ ID NO: 372 - DNA, 20 bp, Artificial Sequence
  Description of Artificial Sequence: Synthetic oligonucleotide
gagtgaagagaatagactgt

SEQ ID NO: 373 - DNA, 20 bp, Artificial Sequence
  Description of Artificial Sequence: Synthetic oligonucleotide
gagtggagagaatagactgt

SEQ ID NO: 374 - DNA, 20 bp, Artificial Sequence
  Description of Artificial Sequence: Synthetic oligonucleotide
gagtaaagagaatagactgt

SEQ ID NO: 375 - DNA, 20 bp, Artificial Sequence
  Description of Artificial Sequence: Synthetic oligonucleotide
gagtggggagaatagactgt

SEQ ID NO: 376 - DNA, 20 bp, Artificial Sequence
  Description of Artificial Sequence: Synthetic oligonucleotide
gagtagagagaatagactgt

SEQ ID NO: 377 - DNA, 20 bp, Artificial Sequence
  Description of Artificial Sequence: Synthetic oligonucleotide
gaatactaagcatagactcc

SEQ ID NO: 378 - DNA, 20 bp, Artificial Sequence
  Description of Artificial Sequence: Synthetic oligonucleotide
gaatactaagcatagactcc

SEQ ID NO: 379 - DNA, 20 bp, Artificial Sequence
  Description of Artificial Sequence: Synthetic oligonucleotide
gaatgctaagcatagactcc

SEQ ID NO: 380 - DNA, 20 bp, Artificial Sequence
  Description of Artificial Sequence: Synthetic oligonucleotide
gaatgttaagcatagactcc

SEQ ID NO: 381 - DNA, 20 bp, Artificial Sequence
  Description of Artificial Sequence: Synthetic oligonucleotide
gaatgctgagcatagactcc

SEQ ID NO: 382 - DNA, 20 bp, Artificial Sequence
  Description of Artificial Sequence: Synthetic oligonucleotide
gaatgttgagcatagactcc

SEQ ID NO: 383 - DNA, 20 bp, Artificial Sequence
  Description of Artificial Sequence: Synthetic oligonucleotide
gtaaacaaagcatagactga

SEQ ID NO: 384 - DNA, 20 bp, Artificial Sequence
  Description of Artificial Sequence: Synthetic oligonucleotide
gtaaacaaagcatagactga

SEQ ID NO: 385 - DNA, 20 bp, Artificial Sequence
  Description of Artificial Sequence: Synthetic oligonucleotide
gtaagcaaagcatagactga

SEQ ID NO: 386 - DNA, 20 bp, Artificial Sequence
  Description of Artificial Sequence: Synthetic oligonucleotide
gtaagcgaagcatagactga

SEQ ID NO: 387 - DNA, 20 bp, Artificial Sequence
  Description of Artificial Sequence: Synthetic oligonucleotide
gtaagtgaagcatagactga

SEQ ID NO: 388 - DNA, 20 bp, Artificial Sequence
  Description of Artificial Sequence: Synthetic oligonucleotide
gtaaacgaagcatagactga

SEQ ID NO: 389 - DNA, 20 bp, Artificial Sequence
  Description of Artificial Sequence: Synthetic oligonucleotide
gtaaataaagcatagactga

SEQ ID NO: 390 - DNA, 20 bp, Artificial Sequence
  Description of Artificial Sequence: Synthetic oligonucleotide
gtaagtaaagcatagactga

SEQ ID NO: 391 - DNA, 20 bp, Artificial Sequence
  Description of Artificial Sequence: Synthetic oligonucleotide
gtaagcagagcatagactga

SEQ ID NO: 392 - DNA, 20 bp, Artificial Sequence
  Description of Artificial Sequence: Synthetic oligonucleotide
gtaggcaaagcatagactga

SEQ ID NO: 393 - DNA, 20 bp, Artificial Sequence
  Description of Artificial Sequence: Synthetic oligonucleotide
gtaaatgaagcatagactga

SEQ ID NO: 394 - DNA, 20 bp, Artificial Sequence
  Description of Artificial Sequence: Synthetic oligonucleotide
gaagaccaaggatagactgc

SEQ ID NO: 395 - DNA, 20 bp, Artificial Sequence
  Description of Artificial Sequence: Synthetic oligonucleotide
gaagaccaaggatagactgc

SEQ ID NO: 396 - DNA, 20 bp, Artificial Sequence
  Description of Artificial Sequence: Synthetic oligonucleotide
gaaggctaaggatagactgc

SEQ ID NO: 397 - DNA, 20 bp, Artificial Sequence
  Description of Artificial Sequence: Synthetic oligonucleotide
gaagactaaggatagactgc

SEQ ID NO: 398 - DNA, 20 bp, Artificial Sequence
  Description of Artificial Sequence: Synthetic oligonucleotide
gaaggctgaggatagactgc

SEQ ID NO: 399 - DNA, 20 bp, Artificial Sequence
  Description of Artificial Sequence: Synthetic oligonucleotide
gaaggccaaggatagactgc

SEQ ID NO: 400 - DNA, 20 bp, Artificial Sequence
  Description of Artificial Sequence: Synthetic oligonucleotide
gaaggttaaggatagactgc

SEQ ID NO: 401 - DNA, 20 bp, Artificial Sequence
  Description of Artificial Sequence: Synthetic oligonucleotide
gaagactgaggatagactgc

SEQ ID NO: 402 - DNA, 20 bp, Artificial Sequence
  Description of Artificial Sequence: Synthetic oligonucleotide
gaaggtcaaggatagactgc

SEQ ID NO: 403 - DNA, 20 bp, Artificial Sequence
  Description of Artificial Sequence: Synthetic oligonucleotide
gaagattaaggatagactgc

SEQ ID NO: 404 - DNA, 20 bp, Artificial Sequence
  Description of Artificial Sequence: Synthetic oligonucleotide
gaaggttgaggatagactgc

SEQ ID NO: 405 - DNA, 20 bp, Artificial Sequence
  Description of Artificial Sequence: Synthetic oligonucleotide
gaacataaagaatagaatga

SEQ ID NO: 406 - DNA, 20 bp, Artificial Sequence
  Description of Artificial Sequence: Synthetic oligonucleotide
gaacataaagaatagaatga

SEQ ID NO: 407 - DNA, 20 bp, Artificial Sequence
  Description of Artificial Sequence: Synthetic oligonucleotide
gaacgtgaagaatagaatga

SEQ ID NO: 408 - DNA, 20 bp, Artificial Sequence
  Description of Artificial Sequence: Synthetic oligonucleotide
gaatgtgaagaatagaatga

SEQ ID NO: 409 - DNA, 20 bp, Artificial Sequence
  Description of Artificial Sequence: Synthetic oligonucleotide
gaatataaagaatagaatga

SEQ ID NO: 410 - DNA, 20 bp, Artificial Sequence
  Description of Artificial Sequence: Synthetic oligonucleotide
gaacatgaagaatagaatga

SEQ ID NO: 411 - DNA, 20 bp, Artificial Sequence
  Description of Artificial Sequence: Synthetic oligonucleotide
ggacaggcagcatagactgt

SEQ ID NO: 412 - DNA, 20 bp, Artificial Sequence
  Description of Artificial Sequence: Synthetic oligonucleotide
ggacaggcagcatagactgt

SEQ ID NO: 413 - DNA, 20 bp, Artificial Sequence
  Description of Artificial Sequence: Synthetic oligonucleotide
ggatgggcagcatagactgt

SEQ ID NO: 414 - DNA, 20 bp, Artificial Sequence
  Description of Artificial Sequence: Synthetic oligonucleotide
ggatgggcagtatagactgt

SEQ ID NO: 415 - DNA, 20 bp, Artificial Sequence
  Description of Artificial Sequence: Synthetic oligonucleotide
ggatgggtagcatagactgt

SEQ ID NO: 416 - DNA, 20 bp, Artificial Sequence
  Description of Artificial Sequence: Synthetic oligonucleotide
ggataggcagcatagactgt

SEQ ID NO: 417 - DNA, 20 bp, Artificial Sequence
  Description of Artificial Sequence: Synthetic oligonucleotide
ggacgggcagcatagactgt

SEQ ID NO: 418 - DNA, 20 bp, Artificial Sequence
  Description of Artificial Sequence: Synthetic oligonucleotide
ggatgggtagtatagactgt

SEQ ID NO: 419 - DNA, 20 bp, Artificial Sequence
  Description of Artificial Sequence: Synthetic oligonucleotide
ggataggcagtatagactgt

SEQ ID NO: 420 - DNA, 20 bp, Artificial Sequence
  Description of Artificial Sequence: Synthetic oligonucleotide
ggctaaagaccatagactgt

SEQ ID NO: 421 - DNA, 20 bp, Artificial Sequence
  Description of Artificial Sequence: Synthetic oligonucleotide
ggctaaagaccatagactgt

SEQ ID NO: 422 - DNA, 20 bp, Artificial Sequence
  Description of Artificial Sequence: Synthetic oligonucleotide
ggttgaagaccatagactgt

SEQ ID NO: 423 - DNA, 20 bp, Artificial Sequence
  Description of Artificial Sequence: Synthetic oligonucleotide
ggttaaagaccatagactgt

SEQ ID NO: 424 - DNA, 20 bp, Artificial Sequence
  Description of Artificial Sequence: Synthetic oligonucleotide
ggttaaagactatagactgt

SEQ ID NO: 425 - DNA, 20 bp, Artificial Sequence
  Description of Artificial Sequence: Synthetic oligonucleotide
ggttgaagactatagactgt

SEQ ID NO: 426 - DNA, 20 bp, Artificial Sequence
  Description of Artificial Sequence: Synthetic oligonucleotide
ggttggagaccatagactgt

SEQ ID NO: 427 - DNA, 20 bp, Artificial Sequence
  Description of Artificial Sequence: Synthetic oligonucleotide
gtctagaaagcttagactgc

SEQ ID NO: 428 - DNA, 20 bp, Artificial Sequence
  Description of Artificial Sequence: Synthetic oligonucleotide
gtctagaaagcttagactgc

SEQ ID NO: 429 - DNA, 20 bp, Artificial Sequence
  Description of Artificial Sequence: Synthetic oligonucleotide
gtttggaaagcttagactgc

SEQ ID NO: 430 - DNA, 20 bp, Artificial Sequence
  Description of Artificial Sequence: Synthetic oligonucleotide
gtttagaaagcttagactgc

SEQ ID NO: 431 - DNA, 20 bp, Artificial Sequence
  Description of Artificial Sequence: Synthetic oligonucleotide
gtttgggaagcttagactgc

SEQ ID NO: 432 - DNA, 20 bp, Artificial Sequence
  Description of Artificial Sequence: Synthetic oligonucleotide
gtgtagaaagcttagactgc

SEQ ID NO: 433 - DNA, 20 bp, Artificial Sequence
  Description of Artificial Sequence: Synthetic oligonucleotide
gtttggaaagtttagactgc

SEQ ID NO: 434 - DNA, 20 bp, Artificial Sequence
  Description of Artificial Sequence: Synthetic oligonucleotide
gtctggaaagcttagactgc

SEQ ID NO: 435 - DNA, 20 bp, Artificial Sequence
  Description of Artificial Sequence: Synthetic oligonucleotide
gtttagaaagtttagactgc

SEQ ID NO: 436 - DNA, 20 bp, Artificial Sequence
  Description of Artificial Sequence: Synthetic oligonucleotide
gacaaagaggaagagagacg

SEQ ID NO: 437 - DNA, 20 bp, Artificial Sequence
  Description of Artificial Sequence: Synthetic oligonucleotide
gacaaagaggaagagagacg

SEQ ID NO: 438 - DNA, 20 bp, Artificial Sequence
  Description of Artificial Sequence: Synthetic oligonucleotide
gataaagaggaagagagacg

SEQ ID NO: 439 - DNA, 20 bp, Artificial Sequence
  Description of Artificial Sequence: Synthetic oligonucleotide
gatggggaggaagagagacg

SEQ ID NO: 440 - DNA, 20 bp, Artificial Sequence
  Description of Artificial Sequence: Synthetic oligonucleotide
gatgaggaggaagagagacg

SEQ ID NO: 441 - DNA, 20 bp, Artificial Sequence
  Description of Artificial Sequence: Synthetic oligonucleotide
gataaggaggaagagagacg

SEQ ID NO: 442 - DNA, 20 bp, Artificial Sequence
  Description of Artificial Sequence: Synthetic oligonucleotide
gatagggaggaagagagacg

SEQ ID NO: 443 - DNA, 20 bp, Artificial Sequence
  Description of Artificial Sequence: Synthetic oligonucleotide
gatgaagaggaagagagacg

SEQ ID NO: 444 - DNA, 20 bp, Artificial Sequence
  Description of Artificial Sequence: Synthetic oligonucleotide
gatggagaggaagagagacg

SEQ ID NO: 445 - DNA, 20 bp, Artificial Sequence
  Description of Artificial Sequence: Synthetic oligonucleotide
gatagagaggaagagagacg

SEQ ID NO: 446 - DNA, 20 bp, Artificial Sequence
  Description of Artificial Sequence: Synthetic oligonucleotide
acacacacacttagaatctg

SEQ ID NO: 447 - DNA, 20 bp, Artificial Sequence
  Description of Artificial Sequence: Synthetic oligonucleotide
acacacacacttagaatctg

SEQ ID NO: 448 - DNA, 20 bp, Artificial Sequence
  Description of Artificial Sequence: Synthetic oligonucleotide
acatacacacttagaatctg

SEQ ID NO: 449 - DNA, 20 bp, Artificial Sequence
  Description of Artificial Sequence: Synthetic oligonucleotide
atatacacacttagaatctg

SEQ ID NO: 450 - DNA, 20 bp, Artificial Sequence
  Description of Artificial Sequence: Synthetic oligonucleotide
atatgtgcacttagaatctg

SEQ ID NO: 451 - DNA, 20 bp, Artificial Sequence
  Description of Artificial Sequence: Synthetic oligonucleotide
acatgcacacttagaatctg

SEQ ID NO: 452 - DNA, 20 bp, Artificial Sequence
  Description of Artificial Sequence: Synthetic oligonucleotide
atatgcacacttagaatctg

SEQ ID NO: 453 - DNA, 20 bp, Artificial Sequence
  Description of Artificial Sequence: Synthetic oligonucleotide
atatgcgcacttagaatctg

SEQ ID NO: 454 - DNA, 20 bp, Artificial Sequence
  Description of Artificial Sequence: Synthetic oligonucleotide
acatacgcacttagaatctg

SEQ ID NO: 455 - DNA, 20 bp, Artificial Sequence
  Description of Artificial Sequence: Synthetic oligonucleotide
acatgcgcacttagaatctg

SEQ ID NO: 456 - DNA, 20 bp, Artificial Sequence
  Description of Artificial Sequence: Synthetic oligonucleotide
acatgtgcacttagaatctg

SEQ ID NO: 457 - DNA, 20 bp, Artificial Sequence
  Description of Artificial Sequence: Synthetic oligonucleotide
atatacgcacttagaatctg

SEQ ID NO: 458 - DNA, 20 bp, Artificial Sequence
  Description of Artificial Sequence: Synthetic oligonucleotide
acacacgcacttagaatctg

SEQ ID NO: 459 - DNA, 20 bp, Artificial Sequence
  Description of Artificial Sequence: Synthetic oligonucleotide
atatgtgtacttagaatctg

SEQ ID NO: 460 - DNA, 20 bp, Artificial Sequence
  Description of Artificial Sequence: Synthetic oligonucleotide
atgtgtgcacttagaatctg

SEQ ID NO: 461 - DNA, 20 bp, Artificial Sequence
  Description of Artificial Sequence: Synthetic oligonucleotide
atatgtgtgcttagaatctg

SEQ ID NO: 462 - DNA, 20 bp, Artificial Sequence
  Description of Artificial Sequence: Synthetic oligonucleotide
cacacacacttagaatctgt

SEQ ID NO: 463 - DNA, 20 bp, Artificial Sequence
  Description of Artificial Sequence: Synthetic oligonucleotide
cacacacacttagaatctgt

SEQ ID NO: 464 - DNA, 20 bp, Artificial Sequence
  Description of Artificial Sequence: Synthetic oligonucleotide
cacacgcacttagaatctgt

SEQ ID NO: 465 - DNA, 20 bp, Artificial Sequence
  Description of Artificial Sequence: Synthetic oligonucleotide
catacacacttagaatctgt

SEQ ID NO: 466 - DNA, 20 bp, Artificial Sequence
  Description of Artificial Sequence: Synthetic oligonucleotide
cacgcacacttagaatctgt

SEQ ID NO: 467 - DNA, 20 bp, Artificial Sequence
  Description of Artificial Sequence: Synthetic oligonucleotide
cacgcgcacttagaatctgt

SEQ ID NO: 468 - DNA, 20 bp, Artificial Sequence
  Description of Artificial Sequence: Synthetic oligonucleotide
catgcacacttagaatctgt

SEQ ID NO: 469 - DNA, 20 bp, Artificial Sequence
  Description of Artificial Sequence: Synthetic oligonucleotide
catacgcacttagaatctgt

SEQ ID NO: 470 - DNA, 20 bp, Artificial Sequence
  Description of Artificial Sequence: Synthetic oligonucleotide
tatacacacttagaatctgt

SEQ ID NO: 471 - DNA, 20 bp, Artificial Sequence
  Description of Artificial Sequence: Synthetic oligonucleotide
catgcgcacttagaatctgt

SEQ ID NO: 472 - DNA, 20 bp, Artificial Sequence
  Description of Artificial Sequence: Synthetic oligonucleotide
gagtccgagcagaagaagaa

SEQ ID NO: 473 - DNA, 20 bp, Artificial Sequence
  Description of Artificial Sequence: Synthetic oligonucleotide
gagtccgagcagaagaagaa

SEQ ID NO: 474 - DNA, 20 bp, Artificial Sequence
  Description of Artificial Sequence: Synthetic oligonucleotide
gagttcgagcagaagaagaa

SEQ ID NO: 475 - DNA, 20 bp, Artificial Sequence
  Description of Artificial Sequence: Synthetic oligonucleotide
gagtttgagcagaagaagaa

SEQ ID NO: 476 - DNA, 20 bp, Artificial Sequence
  Description of Artificial Sequence: Synthetic oligonucleotide
gagtctgagcagaagaagaa

SEQ ID NO: 477 - DNA, 20 bp, Artificial Sequence
  Description of Artificial Sequence: Synthetic oligonucleotide
gagttcgagtagaagaagaa

SEQ ID NO: 478 - DNA, 20 bp, Artificial Sequence
  Description of Artificial Sequence: Synthetic oligonucleotide
gtattcacctgaaagtgtgc

SEQ ID NO: 479 - DNA, 20 bp, Artificial Sequence
  Description of Artificial Sequence: Synthetic oligonucleotide
gtattcacctgaaagtgtgc

SEQ ID NO: 480 - DNA, 20 bp, Artificial Sequence
  Description of Artificial Sequence: Synthetic oligonucleotide
gtattcgcctgaaagtgtgc

SEQ ID NO: 481 - DNA, 20 bp, Artificial Sequence
  Description of Artificial Sequence: Synthetic oligonucleotide
gtatttgcctgaaagtgtgc

SEQ ID NO: 482 - DNA, 20 bp, Artificial Sequence
  Description of Artificial Sequence: Synthetic oligonucleotide
gtatttacctgaaagtgtgc

SEQ ID NO: 483 - DNA, 20 bp, Artificial Sequence
  Description of Artificial Sequence: Synthetic oligonucleotide
gtattcgcttgaaagtgtgc

SEQ ID NO: 484 - DNA, 20 bp, Artificial Sequence
  Description of Artificial Sequence: Synthetic oligonucleotide
gtattcacttgaaagtgtgc

SEQ ID NO: 485 - DNA, 20 bp, Artificial Sequence
  Description of Artificial Sequence: Synthetic oligonucleotide
ggaatcccttctgcagcacc

SEQ ID NO: 486 - DNA, 20 bp, Artificial Sequence
  Description of Artificial Sequence: Synthetic oligonucleotide
ggaatcccttctgcagcacc

SEQ ID NO: 487 - DNA, 20 bp, Artificial Sequence
  Description of Artificial Sequence: Synthetic oligonucleotide
ggaattccttctgcagcacc

SEQ ID NO: 488 - DNA, 20 bp, Artificial Sequence
  Description of Artificial Sequence: Synthetic oligonucleotide
ggagttccttctgcagcacc

SEQ ID NO: 489 - DNA, 20 bp, Artificial Sequence
  Description of Artificial Sequence: Synthetic oligonucleotide
ggaatcctttctgcagcacc

SEQ ID NO: 490 - DNA, 20 bp, Artificial Sequence
  Description of Artificial Sequence: Synthetic oligonucleotide
ggaattctttctgcagcacc

SEQ ID NO: 491 - DNA, 20 bp, Artificial Sequence
  Description of Artificial Sequence: Synthetic oligonucleotide
ggaatcccttttgcagcacc

SEQ ID NO: 492 - DNA, 20 bp, Artificial Sequence
  Description of Artificial Sequence: Synthetic oligonucleotide
ggaatttcttctgcagcacc

SEQ ID NO: 493 - DNA, 20 bp, Artificial Sequence
  Description of Artificial Sequence: Synthetic oligonucleotide
ggaattccttttgcagcacc

SEQ ID NO: 494 - DNA, 20 bp, Artificial Sequence
  Description of Artificial Sequence: Synthetic oligonucleotide
ggaatctcttctgcagcacc

SEQ ID NO: 495 - DNA, 20 bp, Artificial Sequence
  Description of Artificial Sequence: Synthetic oligonucleotide
ggcccagactgagcacgtga

SEQ ID NO: 496 - DNA, 20 bp, Artificial Sequence
  Description of Artificial Sequence: Synthetic oligonucleotide
ggcccagactgagcacgtga

SEQ ID NO: 497 - DNA, 20 bp, Artificial Sequence
  Description of Artificial Sequence: Synthetic oligonucleotide
ggttcagactgagcacgtga

SEQ ID NO: 498 - DNA, 20 bp, Artificial Sequence
  Description of Artificial Sequence: Synthetic oligonucleotide
ggtttagactgagcacgtga

SEQ ID NO: 499 - DNA, 20 bp, Artificial Sequence
  Description of Artificial Sequence: Synthetic oligonucleotide
ggtctagactgagcacgtga

SEQ ID NO: 500 - DNA, 20 bp, Artificial Sequence
  Description of Artificial Sequence: Synthetic oligonucleotide
ggtttggactgagcacgtga

SEQ ID NO: 501 - DNA, 20 bp, Artificial Sequence
  Description of Artificial Sequence: Synthetic oligonucleotide
ggtccagactgagcacgtga

SEQ ID NO: 502 - DNA, 20 bp, Artificial Sequence
  Description of Artificial Sequence: Synthetic oligonucleotide
ggtctggactgagcacgtga

SEQ ID NO: 503 - DNA, 20 bp, Artificial Sequence
  Description of Artificial Sequence: Synthetic oligonucleotide
ggttcggactgagcacgtga

SEQ ID NO: 504 - DNA, 20 bp, Artificial Sequence
  Description of Artificial Sequence: Synthetic oligonucleotide
ggcttagactgagcacgtga

SEQ ID NO: 505 - DNA, 20 bp, Artificial Sequence
  Description of Artificial Sequence: Synthetic oligonucleotide
ggtccggactgagcacgtga

SEQ ID NO: 506 - DNA, 20 bp, Artificial Sequence
  Description of Artificial Sequence: Synthetic oligonucleotide
ggcactgcggctggaggtgg

SEQ ID NO: 507 - DNA, 20 bp, Artificial Sequence
  Description of Artificial Sequence: Synthetic oligonucleotide
ggcactgcggctggaggtgg

SEQ ID NO: 508 - DNA, 20 bp, Artificial Sequence
  Description of Artificial Sequence: Synthetic oligonucleotide
ggtgttgcggctggaggtgg

SEQ ID NO: 509 - DNA, 20 bp, Artificial Sequence
  Description of Artificial Sequence: Synthetic oligonucleotide
ggtactgcggctggaggtgg

SEQ ID NO: 510 - DNA, 20 bp, Artificial Sequence
  Description of Artificial Sequence: Synthetic oligonucleotide
ggtgctgtggctggaggtgg

SEQ ID NO: 511 - DNA, 20 bp, Artificial Sequence
  Description of Artificial Sequence: Synthetic oligonucleotide
ggtgttgtggctggaggtgg

SEQ ID NO: 512 - DNA, 20 bp, Artificial Sequence
  Description of Artificial Sequence: Synthetic oligonucleotide
ggtgctgcggctggaggtgg

SEQ ID NO: 513 - DNA, 20 bp, Artificial Sequence
  Description of Artificial Sequence: Synthetic oligonucleotide
ggtattgcggctggaggtgg

SEQ ID NO: 514 - DNA, 20 bp, Artificial Sequence
  Description of Artificial Sequence: Synthetic oligonucleotide
ggtattgtggctggaggtgg

SEQ ID NO: 515 - DNA, 20 bp, Artificial Sequence
  Description of Artificial Sequence: Synthetic oligonucleotide
ggtactgtggctggaggtgg

SEQ ID NO: 516 - DNA, 20 bp, Artificial Sequence
  Description of Artificial Sequence: Synthetic oligonucleotide
gcgtgacttccacatgagcg

SEQ ID NO: 517 - DNA, 20 bp, Artificial Sequence
  Description of Artificial Sequence: Synthetic oligonucleotide
gcgtgacttccacatgagcg

SEQ ID NO: 518 - DNA, 20 bp, Artificial Sequence
  Description of Artificial Sequence: Synthetic oligonucleotide
gcgtggcttccacatgagcg

SEQ ID NO: 519 - DNA, 20 bp, Artificial Sequence
  Description of Artificial Sequence: Synthetic oligonucleotide
gtgtggcttccacatgagcg

SEQ ID NO: 520 - DNA, 20 bp, Artificial Sequence
  Description of Artificial Sequence: Synthetic oligonucleotide
gcgtgacttctacatgagcg

SEQ ID NO: 521 - DNA, 20 bp, Artificial Sequence
  Description of Artificial Sequence: Synthetic oligonucleotide
gcgtggcttctacatgagcg

SEQ ID NO: 522 - DNA, 20 bp, Artificial Sequence
  Description of Artificial Sequence: Synthetic oligonucleotide
gtgtgacttccacatgagcg

SEQ ID NO: 523 - DNA, 20 bp, Artificial Sequence
  Description of Artificial Sequence: Synthetic oligonucleotide
gcgtggctttcacatgagcg

SEQ ID NO: 524 - DNA, 20 bp, Artificial Sequence
  Description of Artificial Sequence: Synthetic oligonucleotide
gtgtggtttccacatgagcg

SEQ ID NO: 525 - DNA, 20 bp, Artificial Sequence
  Description of Artificial Sequence: Synthetic oligonucleotide
gcgtggtttccacatgagcg

SEQ ID NO: 526 - DNA, 20 bp, Artificial Sequence
  Description of Artificial Sequence: Synthetic oligonucleotide
ggcactcgggggcgagagga

SEQ ID NO: 527 - DNA, 20 bp, Artificial Sequence
  Description of Artificial Sequence: Synthetic oligonucleotide
ggcactcgggggcgagagga

SEQ ID NO: 528 - DNA, 20 bp, Artificial Sequence
  Description of Artificial Sequence: Synthetic oligonucleotide
ggtactcgggggcgagagga

SEQ ID NO: 529 - DNA, 20 bp, Artificial Sequence
  Description of Artificial Sequence: Synthetic oligonucleotide
ggtgcttgggggcgagagga

SEQ ID NO: 530 - DNA, 20 bp, Artificial Sequence
  Description of Artificial Sequence: Synthetic oligonucleotide
ggtatttgggggcgagagga

SEQ ID NO: 531 - DNA, 20 bp, Artificial Sequence
  Description of Artificial Sequence: Synthetic oligonucleotide
ggtacttgggggcgagagga

SEQ ID NO: 532 - DNA, 20 bp, Artificial Sequence
  Description of Artificial Sequence: Synthetic oligonucleotide
ggtgtttgggggcgagagga

SEQ ID NO: 533 - DNA, 20 bp, Artificial Sequence
  Description of Artificial Sequence: Synthetic oligonucleotide
ggtgctcgggggcgagagga

SEQ ID NO: 534 - DNA, 20 bp, Artificial Sequence
  Description of Artificial Sequence: Synthetic oligonucleotide
ggtgttcgggggcgagagga

SEQ ID NO: 535 - DNA, 20 bp, Artificial Sequence
  Description of Artificial Sequence: Synthetic oligonucleotide
ggtattcgggggcgagagga

SEQ ID NO: 536 - DNA, 20 bp, Artificial Sequence
  Description of Artificial Sequence: Synthetic oligonucleotide
gagctcactgaacgctggca

SEQ ID NO: 537 - DNA, 20 bp, Artificial Sequence
  Description of Artificial Sequence: Synthetic oligonucleotide
gagctcactgaacgctggca

SEQ ID NO: 538 - DNA, 20 bp, Artificial Sequence
  Description of Artificial Sequence: Synthetic oligonucleotide
gagttcgctgaacgctggca

SEQ ID NO: 539 - DNA, 20 bp, Artificial Sequence
  Description of Artificial Sequence: Synthetic oligonucleotide
gagtttgctgaacgctggca

SEQ ID NO: 540 - DNA, 20 bp, Artificial Sequence
  Description of Artificial Sequence: Synthetic oligonucleotide
gagttcactgaacgctggca

SEQ ID NO: 541 - DNA, 20 bp, Artificial Sequence
  Description of Artificial Sequence: Synthetic oligonucleotide
gagtttactgaacgctggca

SEQ ID NO: 542 - DNA, 20 bp, Artificial Sequence
  Description of Artificial Sequence: Synthetic oligonucleotide
gagcttgctgaacgctggca

SEQ ID NO: 543 - DNA, 20 bp, Artificial Sequence
  Description of Artificial Sequence: Synthetic oligonucleotide
gaccctcagccgtgctgctc

SEQ ID NO: 544 - DNA, 20 bp, Artificial Sequence
  Description of Artificial Sequence: Synthetic oligonucleotide
gaccctcagccgtgctgctc

SEQ ID NO: 545 - DNA, 20 bp, Artificial Sequence
  Description of Artificial Sequence: Synthetic oligonucleotide
gattctcagccgtgctgctc

SEQ ID NO: 546 - DNA, 20 bp, Artificial Sequence
  Description of Artificial Sequence: Synthetic oligonucleotide
gattttcagccgtgctgctc

SEQ ID NO: 547 - DNA, 20 bp, Artificial Sequence
  Description of Artificial Sequence: Synthetic oligonucleotide
gattcttagccgtgctgctc

SEQ ID NO: 548 - DNA, 20 bp, Artificial Sequence
  Description of Artificial Sequence: Synthetic oligonucleotide
gatcttcagccgtgctgctc

SEQ ID NO: 549 - DNA, 20 bp, Artificial Sequence
  Description of Artificial Sequence: Synthetic oligonucleotide
gatcctcagccgtgctgctc

SEQ ID NO: 550 - DNA, 20 bp, Artificial Sequence
  Description of Artificial Sequence: Synthetic oligonucleotide
gatttttagccgtgctgctc

SEQ ID NO: 551 - DNA, 20 bp, Artificial Sequence
  Description of Artificial Sequence: Synthetic oligonucleotide
gactctcagccgtgctgctc

SEQ ID NO: 552 - DNA, 20 bp, Artificial Sequence
  Description of Artificial Sequence: Synthetic oligonucleotide
gactttcagccgtgctgctc

SEQ ID NO: 553 - DNA, 20 bp, Artificial Sequence
  Description of Artificial Sequence: Synthetic oligonucleotide
gatccttagccgtgctgctc

SEQ ID NO: 554 - DNA, 20 bp, Artificial Sequence
  Description of Artificial Sequence: Synthetic oligonucleotide
gatctttagccgtgctgctc

SEQ ID NO: 555 - DNA, 20 bp, Artificial Sequence
  Description of Artificial Sequence: Synthetic oligonucleotide
gaccttcagccgtgctgctc

SEQ ID NO: 556 - DNA, 20 bp, Artificial Sequence
  Description of Artificial Sequence: Synthetic oligonucleotide
gctgactcagagaccctgag

SEQ ID NO: 557 - DNA, 20 bp, Artificial Sequence
  Description of Artificial Sequence: Synthetic oligonucleotide
gctgactcagagaccctgag

SEQ ID NO: 558 - DNA, 20 bp, Artificial Sequence
  Description of Artificial Sequence: Synthetic oligonucleotide
gttgactcagagaccctgag

SEQ ID NO: 559 - DNA, 20 bp, Artificial Sequence
  Description of Artificial Sequence: Synthetic oligonucleotide
gttgacttagagaccctgag

SEQ ID NO: 560 - DNA, 20 bp, Artificial Sequence
  Description of Artificial Sequence: Synthetic oligonucleotide
gttgattcagagaccctgag

SEQ ID NO: 561 - DNA, 20 bp, Artificial Sequence
  Description of Artificial Sequence: Synthetic oligonucleotide
gctggctcagagaccctgag

SEQ ID NO: 562 - DNA, 20 bp, Artificial Sequence
  Description of Artificial Sequence: Synthetic oligonucleotide
gttggcttagagaccctgag

SEQ ID NO: 563 - DNA, 20 bp, Artificial Sequence
  Description of Artificial Sequence: Synthetic oligonucleotide
gctgattcagagaccctgag

SEQ ID NO: 564 - DNA, 20 bp, Artificial Sequence
  Description of Artificial Sequence: Synthetic oligonucleotide
gttggttcagagaccctgag

SEQ ID NO: 565 - DNA, 20 bp, Artificial Sequence
  Description of Artificial Sequence: Synthetic oligonucleotide
ggggctcaacatcggaagag

SEQ ID NO: 566 - DNA, 20 bp, Artificial Sequence
  Description of Artificial Sequence: Synthetic oligonucleotide
ggggctcaacatcggaagag

SEQ ID NO: 567 - DNA, 20 bp, Artificial Sequence
  Description of Artificial Sequence: Synthetic oligonucleotide
ggggtttgacatcggaagag

SEQ ID NO: 568 - DNA, 20 bp, Artificial Sequence
  Description of Artificial Sequence: Synthetic oligonucleotide
ggggtttaacattggaagag

SEQ ID NO: 569 - DNA, 20 bp, Artificial Sequence
  Description of Artificial Sequence: Synthetic oligonucleotide
ggggttcaacattggaagag

SEQ ID NO: 570 - DNA, 20 bp, Artificial Sequence
  Description of Artificial Sequence: Synthetic oligonucleotide
ggggttcaacatcggaagag

SEQ ID NO: 571 - DNA, 20 bp, Artificial Sequence
  Description of Artificial Sequence: Synthetic oligonucleotide
ggggtttaacatcggaagag

SEQ ID NO: 572 - DNA, 20 bp, Artificial Sequence
  Description of Artificial Sequence: Synthetic oligonucleotide
ggggctcaacattggaagag

SEQ ID NO: 573 - DNA, 20 bp, Artificial Sequence
  Description of Artificial Sequence: Synthetic oligonucleotide
ggggttcgacatcggaagag

SEQ ID NO: 574 - DNA, 20 bp, Artificial Sequence
  Description of Artificial Sequence: Synthetic oligonucleotide
ggggcttgacatcggaagag

SEQ ID NO: 575 - DNA, 20 bp, Artificial Sequence
  Description of Artificial Sequence: Synthetic oligonucleotide
ggggtttgacattggaagag

SEQ ID NO: 576 - DNA, 20 bp, Artificial Sequence
  Description of Artificial Sequence: Synthetic oligonucleotide
gctggctcaggttcaggaga

SEQ ID NO: 577 - DNA, 20 bp, Artificial Sequence
  Description of Artificial Sequence: Synthetic oligonucleotide
gctggctcaggttcaggaga

SEQ ID NO: 578 - DNA, 20 bp, Artificial Sequence
  Description of Artificial Sequence: Synthetic oligonucleotide
gttggttcaggttcaggaga

SEQ ID NO: 579 - DNA, 20 bp, Artificial Sequence
  Description of Artificial Sequence: Synthetic oligonucleotide
gttggctcaggttcaggaga

SEQ ID NO: 580 - DNA, 20 bp, Artificial Sequence
  Description of Artificial Sequence: Synthetic oligonucleotide
gttggtttaggttcaggaga

SEQ ID NO: 581 - DNA, 20 bp, Artificial Sequence
  Description of Artificial Sequence: Synthetic oligonucleotide
gctggttcaggttcaggaga

SEQ ID NO: 582 - DNA, 20 bp, Artificial Sequence
  Description of Artificial Sequence: Synthetic oligonucleotide
gttggcttaggttcaggaga

SEQ ID NO: 583 - DNA, 20 bp, Artificial Sequence
  Description of Artificial Sequence: Synthetic oligonucleotide
gtcatcttagtcattacctg

SEQ ID NO: 584 - DNA, 20 bp, Artificial Sequence
  Description of Artificial Sequence: Synthetic oligonucleotide
gtcatcttagtcattacctg

SEQ ID NO: 585 - DNA, 20 bp, Artificial Sequence
  Description of Artificial Sequence: Synthetic oligonucleotide
gttatcttagtcattacctg

SEQ ID NO: 586 - DNA, 20 bp, Artificial Sequence
  Description of Artificial Sequence: Synthetic oligonucleotide
gttattttagtcattacctg

SEQ ID NO: 587 - DNA, 20 bp, Artificial Sequence
  Description of Artificial Sequence: Synthetic oligonucleotide
gttgtcttagtcattacctg

SEQ ID NO: 588 - DNA, 20 bp, Artificial Sequence
  Description of Artificial Sequence: Synthetic oligonucleotide
gttgttttagtcattacctg

SEQ ID NO: 589 - DNA, 20 bp, Artificial Sequence
  Description of Artificial Sequence: Synthetic oligonucleotide
gttatcttagttattacctg

SEQ ID NO: 590 - DNA, 20 bp, Artificial Sequence
  Description of Artificial Sequence: Synthetic oligonucleotide
gaggacgtgtgtgtctgtgt

SEQ ID NO: 591 - DNA, 20 bp, Artificial Sequence
  Description of Artificial Sequence: Synthetic oligonucleotide
gaggacgtgtgtgtctgtgt

SEQ ID NO: 592 - DNA, 20 bp, Artificial Sequence
  Description of Artificial Sequence: Synthetic oligonucleotide
gagggtgtgtgtgtctgtgt

SEQ ID NO: 593 - DNA, 20 bp, Artificial Sequence
  Description of Artificial Sequence: Synthetic oligonucleotide
gagggcgtgtgtgtctgtgt

SEQ ID NO: 594 - DNA, 20 bp, Artificial Sequence
  Description of Artificial Sequence: Synthetic oligonucleotide
gaggatgtgtgtgtctgtgt

SEQ ID NO: 595 - DNA, 20 bp, Artificial Sequence
  Description of Artificial Sequence: Synthetic oligonucleotide
gagggtgtgtgtgtttgtgt

SEQ ID NO: 596 - DNA, 15 bp, Artificial Sequence
  Description of Artificial Sequence: Synthetic oligonucleotide
cacccagactgagca

SEQ ID NO: 597 - DNA, 12 bp, Artificial Sequence
  Description of Artificial Sequence: Synthetic oligonucleotide
gcactgcggccg

SEQ ID NO: 598 - DNA, 11 bp, Artificial Sequence
  Description of Artificial Sequence: Synthetic oligonucleotide
gcgctgcggcg

SEQ ID NO: 599 - DNA, 11 bp, Artificial Sequence
  Description of Artificial Sequence: Synthetic oligonucleotide
gagtctaagca

SEQ ID NO: 600 - DNA, 11 bp, Artificial Sequence
  Description of Artificial Sequence: Synthetic oligonucleotide
gagtccctcct

SEQ ID NO: 601 - DNA, 11 bp, Artificial Sequence
  Description of Artificial Sequence: Synthetic oligonucleotide
gaggcccctct

SEQ ID NO: 602 - DNA, 15 bp, Artificial Sequence
  Description of Artificial Sequence: Synthetic oligonucleotide
accatccctcctgca

SEQ ID NO: 603 - DNA, 11 bp, Artificial Sequence
  Description of Artificial Sequence: Synthetic oligonucleotide
gattgccatcc

SEQ ID NO: 604 - DNA, 11 bp, Artificial Sequence
  Description of Artificial Sequence: Synthetic oligonucleotide
gaatcccatct

SEQ ID NO: 605 - DNA, 10 bp, Artificial Sequence
  Description of Artificial Sequence: Synthetic oligonucleotide
acacaaagca

SEQ ID NO: 606 - DNA, 11 bp, Artificial Sequence
  Description of Artificial Sequence: Synthetic oligonucleotide
tcaagaaagca

SEQ ID NO: 607 - DNA, 11 bp, Artificial Sequence
  Description of Artificial Sequence: Synthetic oligonucleotide
taaacaaagca

SEQ ID NO: 608 - DNA, 11 bp, Artificial Sequence
  Description of Artificial Sequence: Synthetic oligonucleotide
gacaggcagca

SEQ ID NO: 609 - DNA, 11 bp, Artificial Sequence
  Description of Artificial Sequence: Synthetic oligonucleotide
gctaaagacca

SEQ ID NO: 610 - DNA, 11 bp, Artificial Sequence
  Description of Artificial Sequence: Synthetic oligonucleotide
tctagaaagct

SEQ ID NO: 611 - DNA, 10 bp, Artificial Sequence
  Description of Artificial Sequence: Synthetic oligonucleotide
acacacacac

SEQ ID NO: 612 - DNA, 10 bp, Artificial Sequence
  Description of Artificial Sequence: Synthetic oligonucleotide
cacacacact

SEQ ID NO: 613 - DNA, 10 bp, Artificial Sequence
  Description of Artificial Sequence: Synthetic oligonucleotide
aatcccttct

SEQ ID NO: 614 - DNA, 11 bp, Artificial Sequence
  Description of Artificial Sequence: Synthetic oligonucleotide
gcactgcggct

SEQ ID NO: 615 - DNA, 12 bp, Artificial Sequence
  Description of Artificial Sequence: Synthetic oligonucleotide
gcgtgacttcca

SEQ ID NO: 616 - DNA, 13 bp, Artificial Sequence
  Description of Artificial Sequence: Synthetic oligonucleotide
gcactcgggggcg

SEQ ID NO: 617 - DNA, 11 bp, Artificial Sequence
  Description of Artificial Sequence: Synthetic oligonucleotide
accctcagccg

SEQ ID NO: 618 - DNA, 12 bp, Artificial Sequence
  Description of Artificial Sequence: Synthetic oligonucleotide
gctgactcagag

SEQ ID NO: 619 - DNA, 11 bp, Artificial Sequence
  Description of Artificial Sequence: Synthetic oligonucleotide
gctcaacatcg

SEQ ID NO: 620 - DNA, 15 bp, Artificial Sequence
  Description of Artificial Sequence: Synthetic oligonucleotide
gctggctcaggttca

SEQ ID NO: 621 - DNA, 12 bp, Artificial Sequence
  Description of Artificial Sequence: Synthetic oligonucleotide
tcatcttagtca

SEQ ID NO: 622 - DNA, 13 bp, Artificial Sequence
  Description of Artificial Sequence: Synthetic oligonucleotide
gacgtgtgtgtct

SEQ ID NO: 623 - DNA, 20 bp, Artificial Sequence
  Description of Artificial Sequence: Synthetic oligonucleotide
gaacacaaagcatagactgc

SEQ ID NO: 624 - DNA, 20 bp, Artificial Sequence
  Description of Artificial Sequence: Synthetic oligonucleotide
gaacacaaagcatagactgc

SEQ ID NO: 625 - DNA, 20 bp, Artificial Sequence
  Description of Artificial Sequence: Synthetic oligonucleotide
gaacgcgaagcatagactgc

SEQ ID NO: 626 - DNA, 20 bp, Artificial Sequence
  Description of Artificial Sequence: Synthetic oligonucleotide
gaacgcaaagcatagactgc

SEQ ID NO: 627 - DNA, 20 bp, Artificial Sequence
  Description of Artificial Sequence: Synthetic oligonucleotide
gaatgcaaagcatagactgc

SEQ ID NO: 628 - DNA, 20 bp, Artificial Sequence
  Description of Artificial Sequence: Synthetic oligonucleotide
gaatgcgaagcatagactgc

SEQ ID NO: 629 - DNA, 20 bp, Artificial Sequence
  Description of Artificial Sequence: Synthetic oligonucleotide
gaatgtaaagcatagactgc

SEQ ID NO: 630 - DNA, 20 bp, Artificial Sequence
  Description of Artificial Sequence: Synthetic oligonucleotide
gaatacaaagcatagactgc

SEQ ID NO: 631 - DNA, 20 bp, Artificial Sequence
  Description of Artificial Sequence: Synthetic oligonucleotide
gaaagcaaagcatagactgc

SEQ ID NO: 632 - DNA, 20 bp, Artificial Sequence
  Description of Artificial Sequence: Synthetic oligonucleotide
gaacacaaagcatagactgc

SEQ ID NO: 633 - DNA, 20 bp, Artificial Sequence
  Description of Artificial Sequence: Synthetic oligonucleotide
gaatgcaaagcatagactgc

SEQ ID NO: 634 - DNA, 20 bp, Artificial Sequence
  Description of Artificial Sequence: Synthetic oligonucleotide
gaacacaaagcatagactgc

SEQ ID NO: 635 - DNA, 20 bp, Artificial Sequence
  Description of Artificial Sequence: Synthetic oligonucleotide
gaatgtgaagcatagactgc

SEQ ID NO: 636 - DNA, 20 bp, Artificial Sequence
  Description of Artificial Sequence: Synthetic oligonucleotide
gaatgtaaagcatagactgc

SEQ ID NO: 637 - DNA, 20 bp, Artificial Sequence
  Description of Artificial Sequence: Synthetic oligonucleotide
gaatgcgaagcatagactgc

SEQ ID NO: 638 - DNA, 20 bp, Artificial Sequence
  Description of Artificial Sequence: Synthetic oligonucleotide
gaatacaaagcatagactgc

SEQ ID NO: 639 - DNA, 20 bp, Artificial Sequence
  Description of Artificial Sequence: Synthetic oligonucleotide
gaacgcaaagcatagactgc

SEQ ID NO: 640 - DNA, 20 bp, Artificial Sequence
  Description of Artificial Sequence: Synthetic oligonucleotide
gaacgcgaagcatagactgc

SEQ ID NO: 641 - DNA, 20 bp, Artificial Sequence
  Description of Artificial Sequence: Synthetic oligonucleotide
gaatgcaaagtatagactgc

SEQ ID NO: 642 - DNA, 20 bp, Artificial Sequence
  Description of Artificial Sequence: Synthetic oligonucleotide
gagtatgaggcatagactgc

SEQ ID NO: 643 - DNA, 20 bp, Artificial Sequence
  Description of Artificial Sequence: Synthetic oligonucleotide
gagtatgaggcatagactgc

SEQ ID NO: 644 - DNA, 20 bp, Artificial Sequence
  Description of Artificial Sequence: Synthetic oligonucleotide
gagtgtgaggcatagactgc

SEQ ID NO: 645 - DNA, 20 bp, Artificial Sequence
  Description of Artificial Sequence: Synthetic oligonucleotide
gagtgtggggcatagactgc

SEQ ID NO: 646 - DNA, 20 bp, Artificial Sequence
  Description of Artificial Sequence: Synthetic oligonucleotide
gagtatgaggcatagactgc

SEQ ID NO: 647 - DNA, 20 bp, Artificial Sequence
  Description of Artificial Sequence: Synthetic oligonucleotide
gagtatgaggcatagactgc

SEQ ID NO: 648 - DNA, 20 bp, Artificial Sequence
  Description of Artificial Sequence: Synthetic oligonucleotide
gagtgtgaggcatagactgc

SEQ ID NO: 649 - DNA, 20 bp, Artificial Sequence
  Description of Artificial Sequence: Synthetic oligonucleotide
gagtgtgaggtatagactgc

SEQ ID NO: 650 - DNA, 20 bp, Artificial Sequence
  Description of Artificial Sequence: Synthetic oligonucleotide
gtcaagaaagcagagactgc

SEQ ID NO: 651 - DNA, 20 bp, Artificial Sequence
  Description of Artificial Sequence: Synthetic oligonucleotide
gtcaagaaagcagagactgc

SEQ ID NO: 652 - DNA, 20 bp, Artificial Sequence
  Description of Artificial Sequence: Synthetic oligonucleotide
gttaggaaagcagagactgc

SEQ ID NO: 653 - DNA, 20 bp, Artificial Sequence
  Description of Artificial Sequence: Synthetic oligonucleotide
gttaagaaagcagagactgc

SEQ ID NO: 654 - DNA, 20 bp, Artificial Sequence
  Description of Artificial Sequence: Synthetic oligonucleotide
gttgggaaagcagagactgc

SEQ ID NO: 655 - DNA, 20 bp, Artificial Sequence
  Description of Artificial Sequence: Synthetic oligonucleotide
gtcagggaagcagagactgc

SEQ ID NO: 656 - DNA, 20 bp, Artificial Sequence
  Description of Artificial Sequence: Synthetic oligonucleotide
gtgaagaaagcagagactgc

SEQ ID NO: 657 - DNA, 20 bp, Artificial Sequence
  Description of Artificial Sequence: Synthetic oligonucleotide
gtcgggaaagcagagactgc

SEQ ID NO: 658 - DNA, 20 bp, Artificial Sequence
  Description of Artificial Sequence: Synthetic oligonucleotide
gttagggaagcagagactgc

SEQ ID NO: 659 - DNA, 20 bp, Artificial Sequence
  Description of Artificial Sequence: Synthetic oligonucleotide
gtcaggaaagcagagactgc

SEQ ID NO: 660 - DNA, 20 bp, Artificial Sequence
  Description of Artificial Sequence: Synthetic oligonucleotide
gttaaggaagcagagactgc

SEQ ID NO: 661 - DNA, 20 bp, Artificial Sequence
  Description of Artificial Sequence: Synthetic oligonucleotide
gtcggggaagcagagactgc

SEQ ID NO: 662 - DNA, 20 bp, Artificial Sequence
  Description of Artificial Sequence: Synthetic oligonucleotide
gttgagaaagcagagactgc

SEQ ID NO: 663 - DNA, 20 bp, Artificial Sequence
  Description of Artificial Sequence: Synthetic oligonucleotide
gttggggaagcagagactgc

SEQ ID NO: 664 - DNA, 20 bp, Artificial Sequence
  Description of Artificial Sequence: Synthetic oligonucleotide
gtcaagaaagcagagactgc

SEQ ID NO: 665 - DNA, 20 bp, Artificial Sequence
  Description of Artificial Sequence: Synthetic oligonucleotide
gtcaagaaagcagagactgc

SEQ ID NO: 666 - DNA, 20 bp, Artificial Sequence
  Description of Artificial Sequence: Synthetic oligonucleotide
gttaagaaagcagagactgc

SEQ ID NO: 667 - DNA, 20 bp, Artificial Sequence
  Description of Artificial Sequence: Synthetic oligonucleotide
gttaggaaagcagagactgc

SEQ ID NO: 668 - DNA, 20 bp, Artificial Sequence
  Description of Artificial Sequence: Synthetic oligonucleotide
gttaagaaagtagagactgc

SEQ ID NO: 669 - DNA, 20 bp, Artificial Sequence
  Description of Artificial Sequence: Synthetic oligonucleotide
gttgagaaagcagagactgc

SEQ ID NO: 670 - DNA, 20 bp, Artificial Sequence
  Description of Artificial Sequence: Synthetic oligonucleotide
gttgggaaagcagagactgc

SEQ ID NO: 671 - DNA, 20 bp, Artificial Sequence
  Description of Artificial Sequence: Synthetic oligonucleotide
gttaaggaagcagagactgc

SEQ ID NO: 672 - DNA, 20 bp, Artificial Sequence
  Description of Artificial Sequence: Synthetic oligonucleotide
gagcaaagagaatagactgt

SEQ ID NO: 673 - DNA, 20 bp, Artificial Sequence
  Description of Artificial Sequence: Synthetic oligonucleotide
gagcaaagagaatagactgt

SEQ ID NO: 674 - DNA, 20 bp, Artificial Sequence
  Description of Artificial Sequence: Synthetic oligonucleotide
gagtggagagaatagactgt

SEQ ID NO: 675 - DNA, 20 bp, Artificial Sequence
  Description of Artificial Sequence: Synthetic oligonucleotide
gagcggagagaatagactgt

SEQ ID NO: 676 - DNA, 20 bp, Artificial Sequence
  Description of Artificial Sequence: Synthetic oligonucleotide
gagcggggagaatagactgt

SEQ ID NO: 677 - DNA, 20 bp, Artificial Sequence
  Description of Artificial Sequence: Synthetic oligonucleotide
gagtggggagaatagactgt

SEQ ID NO: 678 - DNA, 20 bp, Artificial Sequence
  Description of Artificial Sequence: Synthetic oligonucleotide
gagtgaagagaatagactgt

SEQ ID NO: 679 - DNA, 20 bp, Artificial Sequence
  Description of Artificial Sequence: Synthetic oligonucleotide
gagtaaagagaatagactgt

SEQ ID NO: 680 - DNA, 20 bp, Artificial Sequence
  Description of Artificial Sequence: Synthetic oligonucleotide
gagtgaggagaatagactgt

SEQ ID NO: 681 - DNA, 20 bp, Artificial Sequence
  Description of Artificial Sequence: Synthetic oligonucleotide
gagcgaagagaatagactgt

SEQ ID NO: 682 - DNA, 20 bp, Artificial Sequence
  Description of Artificial Sequence: Synthetic oligonucleotide
gagcaaagagaatagactgt

SEQ ID NO: 683 - DNA, 20 bp, Artificial Sequence
  Description of Artificial Sequence: Synthetic oligonucleotide
gagcaaagagaatagactgt

SEQ ID NO: 684 - DNA, 20 bp, Artificial Sequence
  Description of Artificial Sequence: Synthetic oligonucleotide
gagtgaagagaatagactgt

SEQ ID NO: 685 - DNA, 20 bp, Artificial Sequence
  Description of Artificial Sequence: Synthetic oligonucleotide
gagtggagagaatagactgt

SEQ ID NO: 686 - DNA, 20 bp, Artificial Sequence
  Description of Artificial Sequence: Synthetic oligonucleotide
gagtaaagagaatagactgt

SEQ ID NO: 687 - DNA, 20 bp, Artificial Sequence
  Description of Artificial Sequence: Synthetic oligonucleotide
gagtggggagaatagactgt

SEQ ID NO: 688 - DNA, 20 bp, Artificial Sequence
  Description of Artificial Sequence: Synthetic oligonucleotide
gagtgaggagaatagactgt

SEQ ID NO: 689 - DNA, 20 bp, Artificial Sequence
  Description of Artificial Sequence: Synthetic oligonucleotide
gaatactaagcatagactcc

SEQ ID NO: 690 - DNA, 20 bp, Artificial Sequence
  Description of Artificial Sequence: Synthetic oligonucleotide
gaatactaagcatagactcc

SEQ ID NO: 691 - DNA, 20 bp, Artificial Sequence
  Description of Artificial Sequence: Synthetic oligonucleotide
gaatgctaagcatagactcc

SEQ ID NO: 692 - DNA, 20 bp, Artificial Sequence
  Description of Artificial Sequence: Synthetic oligonucleotide
gaatgctgagcatagactcc

SEQ ID NO: 693 - DNA, 20 bp, Artificial Sequence
  Description of Artificial Sequence: Synthetic oligonucleotide
gaatgttaagcatagactcc

SEQ ID NO: 694 - DNA, 20 bp, Artificial Sequence
  Description of Artificial Sequence: Synthetic oligonucleotide
gaatactaagcatagactcc

SEQ ID NO: 695 - DNA, 20 bp, Artificial Sequence
  Description of Artificial Sequence: Synthetic oligonucleotide
gaatactaagcatagactcc

SEQ ID NO: 696 - DNA, 20 bp, Artificial Sequence
  Description of Artificial Sequence: Synthetic oligonucleotide
gaatgctaagcatagactcc

SEQ ID NO: 697 - DNA, 20 bp, Artificial Sequence
  Description of Artificial Sequence: Synthetic oligonucleotide
gaatgttaagcatagactcc

SEQ ID NO: 698 - DNA, 20 bp, Artificial Sequence
  Description of Artificial Sequence: Synthetic oligonucleotide
gaatgctgagcatagactcc

SEQ ID NO: 699 - DNA, 20 bp, Artificial Sequence
  Description of Artificial Sequence: Synthetic oligonucleotide
gtaaacaaagcatagactga

SEQ ID NO: 700 - DNA, 20 bp, Artificial Sequence
  Description of Artificial Sequence: Synthetic oligonucleotide
gtaaacaaagcatagactga

SEQ ID NO: 701 - DNA, 20 bp, Artificial Sequence
  Description of Artificial Sequence: Synthetic oligonucleotide
gtaagcaaagcatagactga

SEQ ID NO: 702 - DNA, 20 bp, Artificial Sequence
  Description of Artificial Sequence: Synthetic oligonucleotide
gtaagcgaagcatagactga

SEQ ID NO: 703 - DNA, 20 bp, Artificial Sequence
  Description of Artificial Sequence: Synthetic oligonucleotide
gtaggcaaagcatagactga

SEQ ID NO: 704 - DNA, 20 bp, Artificial Sequence
  Description of Artificial Sequence: Synthetic oligonucleotide
gtgagcgaagcatagactga

SEQ ID NO: 705 - DNA, 20 bp, Artificial Sequence
  Description of Artificial Sequence: Synthetic oligonucleotide
gtaggcgaagcatagactga

SEQ ID NO: 706 - DNA, 20 bp, Artificial Sequence
  Description of Artificial Sequence: Synthetic oligonucleotide
gtgagcaaagcatagactga

SEQ ID NO: 707 - DNA, 20 bp, Artificial Sequence
  Description of Artificial Sequence: Synthetic oligonucleotide
gtaaggaaagcatagactga

SEQ ID NO: 708 - DNA, 20 bp, Artificial Sequence
  Description of Artificial Sequence: Synthetic oligonucleotide
gtaaacaaagcatagacgca

SEQ ID NO: 709 - DNA, 20 bp, Artificial Sequence
  Description of Artificial Sequence: Synthetic oligonucleotide
gtaaacaaagcatagactga

SEQ ID NO: 710 - DNA, 20 bp, Artificial Sequence
  Description of Artificial Sequence: Synthetic oligonucleotide
gtaaacaaagcatagactga

SEQ ID NO: 711 - DNA, 20 bp, Artificial Sequence
  Description of Artificial Sequence: Synthetic oligonucleotide
gtaagcaaagcatagactga

SEQ ID NO: 712 - DNA, 20 bp, Artificial Sequence
  Description of Artificial Sequence: Synthetic oligonucleotide
gtaagcgaagcatagactga

SEQ ID NO: 713 - DNA, 20 bp, Artificial Sequence
  Description of Artificial Sequence: Synthetic oligonucleotide
gtaagtgaagcatagactga

SEQ ID NO: 714 - DNA, 20 bp, Artificial Sequence
  Description of Artificial Sequence: Synthetic oligonucleotide
gtaagtaaagcatagactga

SEQ ID NO: 715 - DNA, 20 bp, Artificial Sequence
  Description of Artificial Sequence: Synthetic oligonucleotide
gtaaataaagcatagactga

SEQ ID NO: 716 - DNA, 20 bp, Artificial Sequence
  Description of Artificial Sequence: Synthetic oligonucleotide
gtaagcaaagtatagactga

SEQ ID NO: 717 - DNA, 20 bp, Artificial Sequence
  Description of Artificial Sequence: Synthetic oligonucleotide
gtaggcaaagcatagactga

SEQ ID NO: 718 - DNA, 20 bp, Artificial Sequence
  Description of Artificial Sequence: Synthetic oligonucleotide
gtaaacgaagcatagactga

SEQ ID NO: 719 - DNA, 20 bp, Artificial Sequence
  Description of Artificial Sequence: Synthetic oligonucleotide
gtaaacaaagtatagactga

SEQ ID NO: 720 - DNA, 20 bp, Artificial Sequence
  Description of Artificial Sequence: Synthetic oligonucleotide
gtaaatgaagcatagactga

SEQ ID NO: 721 - DNA, 20 bp, Artificial Sequence
  Description of Artificial Sequence: Synthetic oligonucleotide
gtaggtgaagcatagactga

SEQ ID NO: 722 - DNA, 20 bp, Artificial Sequence
  Description of Artificial Sequence: Synthetic oligonucleotide
gaagaccaaggatagactgc

SEQ ID NO: 723 - DNA, 20 bp, Artificial Sequence
  Description of Artificial Sequence: Synthetic oligonucleotide
gaagaccaaggatagactgc

SEQ ID NO: 724 - DNA, 20 bp, Artificial Sequence
  Description of Artificial Sequence: Synthetic oligonucleotide
gaaggccaaggatagactgc

SEQ ID NO: 725 - DNA, 20 bp, Artificial Sequence
  Description of Artificial Sequence: Synthetic oligonucleotide
gaaggccgaggatagactgc

SEQ ID NO: 726 - DNA, 20 bp, Artificial Sequence
  Description of Artificial Sequence: Synthetic oligonucleotide
gaaggctaaggatagactgc

SEQ ID NO: 727 - DNA, 20 bp, Artificial Sequence
  Description of Artificial Sequence: Synthetic oligonucleotide
gaagactaaggatagactgc

SEQ ID NO: 728 - DNA, 20 bp, Artificial Sequence
  Description of Artificial Sequence: Synthetic oligonucleotide
gaaggctgaggatagactgc

SEQ ID NO: 729 - DNA, 20 bp, Artificial Sequence
  Description of Artificial Sequence: Synthetic oligonucleotide
gaagaccaaggatagactgc

SEQ ID NO: 730 - DNA, 20 bp, Artificial Sequence
  Description of Artificial Sequence: Synthetic oligonucleotide
gaagaccaaggatagactgc

SEQ ID NO: 731 - DNA, 20 bp, Artificial Sequence
  Description of Artificial Sequence: Synthetic oligonucleotide
gaaggctaaggatagactgc

SEQ ID NO: 732 - DNA, 20 bp, Artificial Sequence
  Description of Artificial Sequence: Synthetic oligonucleotide
gaagactaaggatagactgc

SEQ ID NO: 733 - DNA, 20 bp, Artificial Sequence
  Description of Artificial Sequence: Synthetic oligonucleotide
gaaggccaaggatagactgc

SEQ ID NO: 734 - DNA, 20 bp, Artificial Sequence
  Description of Artificial Sequence: Synthetic oligonucleotide
gaaggctgaggatagactgc

SEQ ID NO: 735 - DNA, 20 bp, Artificial Sequence
  Description of Artificial Sequence: Synthetic oligonucleotide
gaaggttaaggatagactgc

SEQ ID NO: 736 - DNA, 20 bp, Artificial Sequence
  Description of Artificial Sequence: Synthetic oligonucleotide
gaagactgaggatagactgc

SEQ ID NO: 737 - DNA, 20 bp, Artificial Sequence
  Description of Artificial Sequence: Synthetic oligonucleotide
gaaggtcaaggatagactgc

SEQ ID NO: 738 - DNA, 20 bp, Artificial Sequence
  Description of Artificial Sequence: Synthetic oligonucleotide
gaagattaaggatagactgc

SEQ ID NO: 739 - DNA, 20 bp, Artificial Sequence
  Description of Artificial Sequence: Synthetic oligonucleotide
gaacataaagaatagaatga

SEQ ID NO: 740 - DNA, 20 bp, Artificial Sequence
  Description of Artificial Sequence: Synthetic oligonucleotide
gaacgtgaagaatagaatga

SEQ ID NO: 741 - DNA, 20 bp, Artificial Sequence
  Description of Artificial Sequence: Synthetic oligonucleotide
gaacataaagaatagaatga

SEQ ID NO: 742 - DNA, 20 bp, Artificial Sequence
  Description of Artificial Sequence: Synthetic oligonucleotide
gaatgtgaagaatagaatga

SEQ ID NO: 743 - DNA, 20 bp, Artificial Sequence
  Description of Artificial Sequence: Synthetic oligonucleotide
gaacgtggagaatagaatga

SEQ ID NO: 744 - DNA, 20 bp, Artificial Sequence
  Description of Artificial Sequence: Synthetic oligonucleotide
gaatataaagaatagaatga

SEQ ID NO: 745 - DNA, 20 bp, Artificial Sequence
  Description of Artificial Sequence: Synthetic oligonucleotide
gagcgtgaagaatagaatga

SEQ ID NO: 746 - DNA, 20 bp, Artificial Sequence
  Description of Artificial Sequence: Synthetic oligonucleotide
gaacataaagaatagaatga

SEQ ID NO: 747 - DNA, 20 bp, Artificial Sequence
  Description of Artificial Sequence: Synthetic oligonucleotide
gaacataaagaatagaatga

SEQ ID NO: 748 - DNA, 20 bp, Artificial Sequence
  Description of Artificial Sequence: Synthetic oligonucleotide
gaacgtgaagaatagaatga

SEQ ID NO: 749 - DNA, 20 bp, Artificial Sequence
  Description of Artificial Sequence: Synthetic oligonucleotide
gaatgtgaagaatagaatga

SEQ ID NO: 750 - DNA, 20 bp, Artificial Sequence
  Description of Artificial Sequence: Synthetic oligonucleotide
gaatataaagaatagaatga

SEQ ID NO: 751 - DNA, 20 bp, Artificial Sequence
  Description of Artificial Sequence: Synthetic oligonucleotide
gaacatgaagaatagaatga

SEQ ID NO: 752 - DNA, 20 bp, Artificial Sequence
  Description of Artificial Sequence: Synthetic oligonucleotide
gaatgtaaagaatagaatga

SEQ ID NO: 753 - DNA, 20 bp, Artificial Sequence
  Description of Artificial Sequence: Synthetic oligonucleotide
ggacaggcagcatagactgt

SEQ ID NO: 754 - DNA, 20 bp, Artificial Sequence
  Description of Artificial Sequence: Synthetic oligonucleotide
ggacaggcagcatagactgt

SEQ ID NO: 755 - DNA, 20 bp, Artificial Sequence
  Description of Artificial Sequence: Synthetic oligonucleotide
ggacgggcagcatagactgt

SEQ ID NO: 756 - DNA, 20 bp, Artificial Sequence
  Description of Artificial Sequence: Synthetic oligonucleotide
ggatgggcagcatagactgt

SEQ ID NO: 757 - DNA, 20 bp, Artificial Sequence
  Description of Artificial Sequence: Synthetic oligonucleotide
gggcgggcagcatagactgt

SEQ ID NO: 758 - DNA, 20 bp, Artificial Sequence
  Description of Artificial Sequence: Synthetic oligonucleotide
ggatgggcagtatagactgt

SEQ ID NO: 759 - DNA, 20 bp, Artificial Sequence
  Description of Artificial Sequence: Synthetic oligonucleotide
ggataggcagcatagactgt

SEQ ID NO: 760 - DNA, 20 bp, Artificial Sequence
  Description of Artificial Sequence: Synthetic oligonucleotide
ggagaggcagcatagactgt

SEQ ID NO: 761 - DNA, 20 bp, Artificial Sequence
  Description of Artificial Sequence: Synthetic oligonucleotide
ggaggggcagcatagactgt

SEQ ID NO: 762 - DNA, 20 bp, Artificial Sequence
  Description of Artificial Sequence: Synthetic oligonucleotide
ggataggcagtatagactgt

SEQ ID NO: 763 - DNA, 20 bp, Artificial Sequence
  Description of Artificial Sequence: Synthetic oligonucleotide
gggtgggcagcatagactgt

SEQ ID NO: 764 - DNA, 20 bp, Artificial Sequence
  Description of Artificial Sequence: Synthetic oligonucleotide
ggacaggcagcatagactgt

SEQ ID NO: 765 - DNA, 20 bp, Artificial Sequence
  Description of Artificial Sequence: Synthetic oligonucleotide
ggacaggcagcatagactgt

SEQ ID NO: 766 - DNA, 20 bp, Artificial Sequence
  Description of Artificial Sequence: Synthetic oligonucleotide
ggatgggcagcatagactgt

SEQ ID NO: 767 - DNA, 20 bp, Artificial Sequence
  Description of Artificial Sequence: Synthetic oligonucleotide
ggatgggcagtatagactgt

SEQ ID NO: 768 - DNA, 20 bp, Artificial Sequence
  Description of Artificial Sequence: Synthetic oligonucleotide
ggatgggtagcatagactgt

SEQ ID NO: 769 - DNA, 20 bp, Artificial Sequence
  Description of Artificial Sequence: Synthetic oligonucleotide
ggataggcagcatagactgt

SEQ ID NO: 770 - DNA, 20 bp, Artificial Sequence
  Description of Artificial Sequence: Synthetic oligonucleotide
ggctaaagaccatagactgt

SEQ ID NO: 771 - DNA, 20 bp, Artificial Sequence
  Description of Artificial Sequence: Synthetic oligonucleotide
ggctaaagaccatagactgt

SEQ ID NO: 772 - DNA, 20 bp, Artificial Sequence
  Description of Artificial Sequence: Synthetic oligonucleotide
ggttgaagaccatagactgt

SEQ ID NO: 773 - DNA, 20 bp, Artificial Sequence
  Description of Artificial Sequence: Synthetic oligonucleotide
ggctgaagaccatagactgt

SEQ ID NO: 774 - DNA, 20 bp, Artificial Sequence
  Description of Artificial Sequence: Synthetic oligonucleotide
ggctggagaccatagactgt

SEQ ID NO: 775 - DNA, 20 bp, Artificial Sequence
  Description of Artificial Sequence: Synthetic oligonucleotide
ggttaaagaccatagactgt

SEQ ID NO: 776 - DNA, 20 bp, Artificial Sequence
  Description of Artificial Sequence: Synthetic oligonucleotide
ggttggagaccatagactgt

SEQ ID NO: 777 - DNA, 20 bp, Artificial Sequence
  Description of Artificial Sequence: Synthetic oligonucleotide
ggctgaggaccatagactgt

SEQ ID NO: 778 - DNA, 20 bp, Artificial Sequence
  Description of Artificial Sequence: Synthetic oligonucleotide
ggttgaggaccatagactgt

SEQ ID NO: 779 - DNA, 19 bp, Artificial Sequence
  Description of Artificial Sequence: Synthetic oligonucleotide
ggtaaagaccatagactgt

SEQ ID NO: 780 - DNA, 20 bp, Artificial Sequence
  Description of Artificial Sequence: Synthetic oligonucleotide
ggctggggaccatagactgt

SEQ ID NO: 781 - DNA, 20 bp, Artificial Sequence
  Description of Artificial Sequence: Synthetic oligonucleotide
ggatgaagaccatagactgt

SEQ ID NO: 782 - DNA, 19 bp, Artificial Sequence
  Description of Artificial Sequence: Synthetic oligonucleotide
ggtgaagaccatagactgt

SEQ ID NO: 783 - DNA, 20 bp, Artificial Sequence
  Description of Artificial Sequence: Synthetic oligonucleotide
gggtaaagaccatagactgt

SEQ ID NO: 784 - DNA, 20 bp, Artificial Sequence
  Description of Artificial Sequence: Synthetic oligonucleotide
ggctaaagaccatagactgt

SEQ ID NO: 785 - DNA, 20 bp, Artificial Sequence
  Description of Artificial Sequence: Synthetic oligonucleotide
ggctaaagaccatagactgt

SEQ ID NO: 786 - DNA, 20 bp, Artificial Sequence
  Description of Artificial Sequence: Synthetic oligonucleotide
ggttgaagaccatagactgt

SEQ ID NO: 787 - DNA, 20 bp, Artificial Sequence
  Description of Artificial Sequence: Synthetic oligonucleotide
ggttaaagaccatagactgt

SEQ ID NO: 788 - DNA, 20 bp, Artificial Sequence
  Description of Artificial Sequence: Synthetic oligonucleotide
ggttgaagactatagactgt

SEQ ID NO: 789 - DNA, 20 bp, Artificial Sequence
  Description of Artificial Sequence: Synthetic oligonucleotide
ggttaaagactatagactgt

SEQ ID NO: 790 - DNA, 20 bp, Artificial Sequence
  Description of Artificial Sequence: Synthetic oligonucleotide
ggttggagaccatagactgt

SEQ ID NO: 791 - DNA, 20 bp, Artificial Sequence
  Description of Artificial Sequence: Synthetic oligonucleotide
gtctagaaagcttagactgc

SEQ ID NO: 792 - DNA, 20 bp, Artificial Sequence
  Description of Artificial Sequence: Synthetic oligonucleotide
gtctagaaagcttagactgc

SEQ ID NO: 793 - DNA, 20 bp, Artificial Sequence
  Description of Artificial Sequence: Synthetic oligonucleotide
gtttggaaagcttagactgc

SEQ ID NO: 794 - DNA, 20 bp, Artificial Sequence
  Description of Artificial Sequence: Synthetic oligonucleotide
gtctggaaagcttagactgc

SEQ ID NO: 795 - DNA, 20 bp, Artificial Sequence
  Description of Artificial Sequence: Synthetic oligonucleotide
gtttgggaagcttagactgc

SEQ ID NO: 796 - DNA, 20 bp, Artificial Sequence
  Description of Artificial Sequence: Synthetic oligonucleotide
gtctgggaagcttagactgc

SEQ ID NO: 797 - DNA, 20 bp, Artificial Sequence
  Description of Artificial Sequence: Synthetic oligonucleotide
gtttagaaagcttagactgc

SEQ ID NO: 798 - DNA, 20 bp, Artificial Sequence
  Description of Artificial Sequence: Synthetic oligonucleotide
gtgtggaaagcttagactgc

SEQ ID NO: 799 - DNA, 20 bp, Artificial Sequence
  Description of Artificial Sequence: Synthetic oligonucleotide
gtgtagaaagcttagactgc

SEQ ID NO: 800 - DNA, 20 bp, Artificial Sequence
  Description of Artificial Sequence: Synthetic oligonucleotide
gtttggagagcttagactgc

SEQ ID NO: 801 - DNA, 20 bp, Artificial Sequence
  Description of Artificial Sequence: Synthetic oligonucleotide
gtctagaaagcttagactgc

SEQ ID NO: 802 - DNA, 20 bp, Artificial Sequence
  Description of Artificial Sequence: Synthetic oligonucleotide
gtctagaaagcttagactgc

SEQ ID NO: 803 - DNA, 20 bp, Artificial Sequence
  Description of Artificial Sequence: Synthetic oligonucleotide
gtttggaaagcttagactgc

SEQ ID NO: 804 - DNA, 20 bp, Artificial Sequence
  Description of Artificial Sequence: Synthetic oligonucleotide
gtttagaaagcttagactgc

SEQ ID NO: 805 - DNA, 20 bp, Artificial Sequence
  Description of Artificial Sequence: Synthetic oligonucleotide
gtttgggaagcttagactgc

SEQ ID NO: 806 - DNA, 20 bp, Artificial Sequence
  Description of Artificial Sequence: Synthetic oligonucleotide
gtctggaaagcttagactgc

SEQ ID NO: 807 - DNA, 20 bp, Artificial Sequence
  Description of Artificial Sequence: Synthetic oligonucleotide
gacaaagaggaagagagacg

SEQ ID NO: 808 - DNA, 20 bp, Artificial Sequence
  Description of Artificial Sequence: Synthetic oligonucleotide
gacaaagaggaagagagacg

SEQ ID NO: 809 - DNA, 20 bp, Artificial Sequence
  Description of Artificial Sequence: Synthetic oligonucleotide
gacggggaggaagagagacg

SEQ ID NO: 810 - DNA, 20 bp, Artificial Sequence
  Description of Artificial Sequence: Synthetic oligonucleotide
gatggggaggaagagagacg

SEQ ID NO: 811 - DNA, 20 bp, Artificial Sequence
  Description of Artificial Sequence: Synthetic oligonucleotide
gacagggaggaagagagacg

SEQ ID NO: 812 - DNA, 20 bp, Artificial Sequence
  Description of Artificial Sequence: Synthetic oligonucleotide
gatagggaggaagagagacg

SEQ ID NO: 813 - DNA, 20 bp, Artificial Sequence
  Description of Artificial Sequence: Synthetic oligonucleotide
gacaaggaggaagagagacg

SEQ ID NO: 814 - DNA, 20 bp, Artificial Sequence
  Description of Artificial Sequence: Synthetic oligonucleotide
gataaagaggaagagagacg

SEQ ID NO: 815 - DNA, 20 bp, Artificial Sequence
  Description of Artificial Sequence: Synthetic oligonucleotide
gagagggaggaagagagacg

SEQ ID NO: 816 - DNA, 20 bp, Artificial Sequence
  Description of Artificial Sequence: Synthetic oligonucleotide
gatggagaggaagagagacg

SEQ ID NO: 817 - DNA, 20 bp, Artificial Sequence
  Description of Artificial Sequence: Synthetic oligonucleotide
gacaaagaggaagagagacg

SEQ ID NO: 818 - DNA, 20 bp, Artificial Sequence
  Description of Artificial Sequence: Synthetic oligonucleotide
gacaaagaggaagagagacg

SEQ ID NO: 819 - DNA, 20 bp, Artificial Sequence
  Description of Artificial Sequence: Synthetic oligonucleotide
gatggggaggaagagagacg

SEQ ID NO: 820 - DNA, 20 bp, Artificial Sequence
  Description of Artificial Sequence: Synthetic oligonucleotide
gataaagaggaagagagacg

SEQ ID NO: 821 - DNA, 20 bp, Artificial Sequence
  Description of Artificial Sequence: Synthetic oligonucleotide
gatgaggaggaagagagacg

SEQ ID NO: 822 - DNA, 20 bp, Artificial Sequence
  Description of Artificial Sequence: Synthetic oligonucleotide
gataaggaggaagagagacg

SEQ ID NO: 823 - DNA, 20 bp, Artificial Sequence
  Description of Artificial Sequence: Synthetic oligonucleotide
gatagggaggaagagagacg

SEQ ID NO: 824 - DNA, 20 bp, Artificial Sequence
  Description of Artificial Sequence: Synthetic oligonucleotide
gatgaagaggaagagagacg

SEQ ID NO: 825 - DNA, 20 bp, Artificial Sequence
  Description of Artificial Sequence: Synthetic oligonucleotide
gatggagaggaagagagacg

SEQ ID NO: 826 - DNA, 20 bp, Artificial Sequence
  Description of Artificial Sequence: Synthetic oligonucleotide
acacacacacttagaatctg

SEQ ID NO: 827 - DNA, 20 bp, Artificial Sequence
  Description of Artificial Sequence: Synthetic oligonucleotide
acacacacacttagaatctg

SEQ ID NO: 828 - DNA, 20 bp, Artificial Sequence
  Description of Artificial Sequence: Synthetic oligonucleotide
acacgcgcacttagaatctg

SEQ ID NO: 829 - DNA, 20 bp, Artificial Sequence
  Description of Artificial Sequence: Synthetic oligonucleotide
acacacgcacttagaatctg

SEQ ID NO: 830 - DNA, 20 bp, Artificial Sequence
  Description of Artificial Sequence: Synthetic oligonucleotide
atatacacacttagaatctg

SEQ ID NO: 831 - DNA, 20 bp, Artificial Sequence
  Description of Artificial Sequence: Synthetic oligonucleotide
acacgcgcgcttagaatctg

SEQ ID NO: 832 - DNA, 20 bp, Artificial Sequence
  Description of Artificial Sequence: Synthetic oligonucleotide
acacgcacacttagaatctg

SEQ ID NO: 833 - DNA, 20 bp, Artificial Sequence
  Description of Artificial Sequence: Synthetic oligonucleotide
acacacgcgcttagaatctg

SEQ ID NO: 834 - DNA, 20 bp, Artificial Sequence
  Description of Artificial Sequence: Synthetic oligonucleotide
atatatacacttagaatctg

SEQ ID NO: 835 - DNA, 20 bp, Artificial Sequence
  Description of Artificial Sequence: Synthetic oligonucleotide
acacacccacttagaatctg

SEQ ID NO: 836 - DNA, 20 bp, Artificial Sequence
  Description of Artificial Sequence: Synthetic oligonucleotide
acatacacacttagaatctg

SEQ ID NO: 837 - DNA, 20 bp, Artificial Sequence
  Description of Artificial Sequence: Synthetic oligonucleotide
acgcgcgcacttagaatctg

SEQ ID NO: 838 - DNA, 20 bp, Artificial Sequence
  Description of Artificial Sequence: Synthetic oligonucleotide
acagacacacttagaatctg

SEQ ID NO: 839 - DNA, 20 bp, Artificial Sequence
  Description of Artificial Sequence: Synthetic oligonucleotide
acacacacacttagaatctg

SEQ ID NO: 840 - DNA, 20 bp, Artificial Sequence
  Description of Artificial Sequence: Synthetic oligonucleotide
acacacacacttagaatctg

SEQ ID NO: 841 - DNA, 20 bp, Artificial Sequence
  Description of Artificial Sequence: Synthetic oligonucleotide
atatacacacttagaatctg

SEQ ID NO: 842 - DNA, 20 bp, Artificial Sequence
  Description of Artificial Sequence: Synthetic oligonucleotide
atatgcacacttagaatctg

SEQ ID NO: 843 - DNA, 20 bp, Artificial Sequence
  Description of Artificial Sequence: Synthetic oligonucleotide
acatacacacttagaatctg

SEQ ID NO: 844 - DNA, 20 bp, Artificial Sequence
  Description of Artificial Sequence: Synthetic oligonucleotide
acatgcacacttagaatctg

SEQ ID NO: 845 - DNA, 20 bp, Artificial Sequence
  Description of Artificial Sequence: Synthetic oligonucleotide
atatgtgcacttagaatctg

SEQ ID NO: 846 - DNA, 20 bp, Artificial Sequence
  Description of Artificial Sequence: Synthetic oligonucleotide
acacgcacacttagaatctg

SEQ ID NO: 847 - DNA, 20 bp, Artificial Sequence
  Description of Artificial Sequence: Synthetic oligonucleotide
acatgcgcacttagaatctg

SEQ ID NO: 848 - DNA, 20 bp, Artificial Sequence
  Description of Artificial Sequence: Synthetic oligonucleotide
atatgcgcacttagaatctg

SEQ ID NO: 849 - DNA, 20 bp, Artificial Sequence
  Description of Artificial Sequence: Synthetic oligonucleotide
acacacgcacttagaatctg

SEQ ID NO: 850 - DNA, 20 bp, Artificial Sequence
  Description of Artificial Sequence: Synthetic oligonucleotide
atatatgcacttagaatctg

SEQ ID NO: 851 - DNA, 20 bp, Artificial Sequence
  Description of Artificial Sequence: Synthetic oligonucleotide
acatgtgcacttagaatctg

SEQ ID NO: 852 - DNA, 20 bp, Artificial Sequence
  Description of Artificial Sequence: Synthetic oligonucleotide
atatgtgcgcttagaatctg

SEQ ID NO: 853 - DNA, 20 bp, Artificial Sequence
  Description of Artificial Sequence: Synthetic oligonucleotide
acatacgcacttagaatctg

SEQ ID NO: 854 - DNA, 20 bp, Artificial Sequence
  Description of Artificial Sequence: Synthetic oligonucleotide
acacacccacttagaatctg

SEQ ID NO: 855 - DNA, 20 bp, Artificial Sequence
  Description of Artificial Sequence: Synthetic oligonucleotide
acatatacacttagaatctg

SEQ ID NO: 856 - DNA, 20 bp, Artificial Sequence
  Description of Artificial Sequence: Synthetic oligonucleotide
cacacacacttagaatctgt

SEQ ID NO: 857 - DNA, 20 bp, Artificial Sequence
  Description of Artificial Sequence: Synthetic oligonucleotide
cacacacacttagaatctgt

SEQ ID NO: 858 - DNA, 20 bp, Artificial Sequence
  Description of Artificial Sequence: Synthetic oligonucleotide
cacacgcgcttagaatctgt

SEQ ID NO: 859 - DNA, 20 bp, Artificial Sequence
  Description of Artificial Sequence: Synthetic oligonucleotide
cacgcgcgcttagaatctgt

SEQ ID NO: 860 - DNA, 20 bp, Artificial Sequence
  Description of Artificial Sequence: Synthetic oligonucleotide
cacgcgcacttagaatctgt

SEQ ID NO: 861 - DNA, 20 bp, Artificial Sequence
  Description of Artificial Sequence: Synthetic oligonucleotide
cacacgcacttagaatctgt

SEQ ID NO: 862 - DNA, 20 bp, Artificial Sequence
  Description of Artificial Sequence: Synthetic oligonucleotide
cacgcacacttagaatctgt

SEQ ID NO: 863 - DNA, 20 bp, Artificial Sequence
  Description of Artificial Sequence: Synthetic oligonucleotide
cacacacgcttagaatctgt

SEQ ID NO: 864 - DNA, 20 bp, Artificial Sequence
  Description of Artificial Sequence: Synthetic oligonucleotide
catacacacttagaatctgt

SEQ ID NO: 865 - DNA, 20 bp, Artificial Sequence
  Description of Artificial Sequence: Synthetic oligonucleotide
tatacacacttagaatctgt

SEQ ID NO: 866 - DNA, 20 bp, Artificial Sequence
  Description of Artificial Sequence: Synthetic oligonucleotide
tatatacacttagaatctgt

SEQ ID NO: 867 - DNA, 20 bp, Artificial Sequence
  Description of Artificial Sequence: Synthetic oligonucleotide
cacgcacgcttagaatctgt

SEQ ID NO: 868 - DNA, 20 bp, Artificial Sequence
  Description of Artificial Sequence: Synthetic oligonucleotide
cacacccacttagaatctgt

SEQ ID NO: 869 - DNA, 20 bp, Artificial Sequence
  Description of Artificial Sequence: Synthetic oligonucleotide
catgcgcgcttagaatctgt

SEQ ID NO: 870 - DNA, 20 bp, Artificial Sequence
  Description of Artificial Sequence: Synthetic oligonucleotide
cacacacacttagaatctgt

SEQ ID NO: 871 - DNA, 20 bp, Artificial Sequence
  Description of Artificial Sequence: Synthetic oligonucleotide
cacacacacttagaatctgt

SEQ ID NO: 872 - DNA, 20 bp, Artificial Sequence
  Description of Artificial Sequence: Synthetic oligonucleotide
catacacacttagaatctgt

SEQ ID NO: 873 - DNA, 20 bp, Artificial Sequence
  Description of Artificial Sequence: Synthetic oligonucleotide
tatacacacttagaatctgt

SEQ ID NO: 874 - DNA, 20 bp, Artificial Sequence
  Description of Artificial Sequence: Synthetic oligonucleotide
catacgcacttagaatctgt

SEQ ID NO: 875 - DNA, 20 bp, Artificial Sequence
  Description of Artificial Sequence: Synthetic oligonucleotide
catatacacttagaatctgt

SEQ ID NO: 876 - DNA, 20 bp, Artificial Sequence
  Description of Artificial Sequence: Synthetic oligonucleotide
catgtgcacttagaatctgt

SEQ ID NO: 877 - DNA, 20 bp, Artificial Sequence
  Description of Artificial Sequence: Synthetic oligonucleotide
catgcgcacttagaatctgt

SEQ ID NO: 878 - DNA, 20 bp, Artificial Sequence
  Description of Artificial Sequence: Synthetic oligonucleotide
catacacgcttagaatctgt

SEQ ID NO: 879 - DNA, 20 bp, Artificial Sequence
  Description of Artificial Sequence: Synthetic oligonucleotide
catgtgtgcttagaatctgt

SEQ ID NO: 880 - DNA, 20 bp, Artificial Sequence
  Description of Artificial Sequence: Synthetic oligonucleotide
cacgcgcacttagaatctgt

SEQ ID NO: 881 - DNA, 20 bp, Artificial Sequence
  Description of Artificial Sequence: Synthetic oligonucleotide
cacacccacttagaatctgt

SEQ ID NO: 882 - DNA, 20 bp, Artificial Sequence
  Description of Artificial Sequence: Synthetic oligonucleotide
tatgtgcacttagaatctgt

SEQ ID NO: 883 - DNA, 20 bp, Artificial Sequence
  Description of Artificial Sequence: Synthetic oligonucleotide
catgcacgcttagaatctgt

SEQ ID NO: 884 - DNA, 20 bp, Artificial Sequence
  Description of Artificial Sequence: Synthetic oligonucleotide
tatgtgtgcttagaatctgt

SEQ ID NO: 885 - DNA, 20 bp, Artificial Sequence
  Description of Artificial Sequence: Synthetic oligonucleotide
catgtgcgcttagaatctgt

SEQ ID NO: 886 - DNA, 20 bp, Artificial Sequence
  Description of Artificial Sequence: Synthetic oligonucleotide
gagtccgagcagaagaagaa

SEQ ID NO: 887 - DNA, 20 bp, Artificial Sequence
  Description of Artificial Sequence: Synthetic oligonucleotide
gagtccgagcagaagaagaa

SEQ ID NO: 888 - DNA, 20 bp, Artificial Sequence
  Description of Artificial Sequence: Synthetic oligonucleotide
gagttcgagcagaagaagaa

SEQ ID NO: 889 - DNA, 20 bp, Artificial Sequence
  Description of Artificial Sequence: Synthetic oligonucleotide
gagtccgagcagaagaagaa

SEQ ID NO: 890 - DNA, 20 bp, Artificial Sequence
  Description of Artificial Sequence: Synthetic oligonucleotide
gagtccgagcagaagaagaa

SEQ ID NO: 891 - DNA, 20 bp, Artificial Sequence
  Description of Artificial Sequence: Synthetic oligonucleotide
gagttcgagcagaagaagaa

SEQ ID NO: 892 - DNA, 20 bp, Artificial Sequence
  Description of Artificial Sequence: Synthetic oligonucleotide
gagtttgagcagaagaagaa

SEQ ID NO: 893 - DNA, 20 bp, Artificial Sequence
  Description of Artificial Sequence: Synthetic oligonucleotide
gagtccgagtagaagaagaa

SEQ ID NO: 894 - DNA, 20 bp, Artificial Sequence
  Description of Artificial Sequence: Synthetic oligonucleotide
gagttcgagtagaagaagaa

SEQ ID NO: 895 - DNA, 20 bp, Artificial Sequence
  Description of Artificial Sequence: Synthetic oligonucleotide
gtattcacctgaaagtgtgc

SEQ ID NO: 896 - DNA, 20 bp, Artificial Sequence
  Description of Artificial Sequence: Synthetic oligonucleotide
gtattcacctgaaagtgtgc

SEQ ID NO: 897 - DNA, 20 bp, Artificial Sequence
  Description of Artificial Sequence: Synthetic oligonucleotide
gtattcgcctgaaagtgtgc

SEQ ID NO: 898 - DNA, 20 bp, Artificial Sequence
  Description of Artificial Sequence: Synthetic oligonucleotide
gtatttgcctgaaagtgtgc

SEQ ID NO: 899 - DNA, 20 bp, Artificial Sequence
  Description of Artificial Sequence: Synthetic oligonucleotide
gtatttacctgaaagtgtgc

SEQ ID NO: 900 - DNA, 20 bp, Artificial Sequence
  Description of Artificial Sequence: Synthetic oligonucleotide
gtgttcgcctgaaagtgtgc

SEQ ID NO: 901 - DNA, 20 bp, Artificial Sequence
  Description of Artificial Sequence: Synthetic oligonucleotide
gtattcacctgaaagtgtgc

SEQ ID NO: 902 - DNA, 20 bp, Artificial Sequence
  Description of Artificial Sequence: Synthetic oligonucleotide
gtattcacctgaaagtgtgc

SEQ ID NO: 903 - DNA, 20 bp, Artificial Sequence
  Description of Artificial Sequence: Synthetic oligonucleotide
gtattcgcctgaaagtgtgc

SEQ ID NO: 904 - DNA, 20 bp, Artificial Sequence
  Description of Artificial Sequence: Synthetic oligonucleotide
gtatttgcctgaaagtgtgc

SEQ ID NO: 905 - DNA, 20 bp, Artificial Sequence
  Description of Artificial Sequence: Synthetic oligonucleotide
gtatttacctgaaagtgtgc

SEQ ID NO: 906 - DNA, 20 bp, Artificial Sequence
  Description of Artificial Sequence: Synthetic oligonucleotide
gtattcacttgaaagtgtgc

SEQ ID NO: 907 - DNA, 20 bp, Artificial Sequence
  Description of Artificial Sequence: Synthetic oligonucleotide
gtattcgcttgaaagtgtgc

SEQ ID NO: 908 - DNA, 20 bp, Artificial Sequence
  Description of Artificial Sequence: Synthetic oligonucleotide
ggaatcccttctgcagcacc

SEQ ID NO: 909 - DNA, 20 bp, Artificial Sequence
  Description of Artificial Sequence: Synthetic oligonucleotide
ggaatcccttctgcagcacc

SEQ ID NO: 910 - DNA, 20 bp, Artificial Sequence
  Description of Artificial Sequence: Synthetic oligonucleotide
ggagttccttctgcagcacc

SEQ ID NO: 911 - DNA, 20 bp, Artificial Sequence
  Description of Artificial Sequence: Synthetic oligonucleotide
ggaattccttctgcagcacc

SEQ ID NO: 912 - DNA, 20 bp, Artificial Sequence
  Description of Artificial Sequence: Synthetic oligonucleotide
ggagtcccttctgcagcacc

SEQ ID NO: 913 - DNA, 20 bp, Artificial Sequence
  Description of Artificial Sequence: Synthetic oligonucleotide
ggaatcccttctgcagcacc

SEQ ID NO: 914 - DNA, 20 bp, Artificial Sequence
  Description of Artificial Sequence: Synthetic oligonucleotide
ggaatcccttctgcagcacc

SEQ ID NO: 915 - DNA, 20 bp, Artificial Sequence
  Description of Artificial Sequence: Synthetic oligonucleotide
ggaattccttctgcagcacc

SEQ ID NO: 916 - DNA, 20 bp, Artificial Sequence
  Description of Artificial Sequence: Synthetic oligonucleotide
ggagttccttctgcagcacc

SEQ ID NO: 917 - DNA, 20 bp, Artificial Sequence
  Description of Artificial Sequence: Synthetic oligonucleotide
ggaattctttctgcagcacc

SEQ ID NO: 918 - DNA, 20 bp, Artificial Sequence
  Description of Artificial Sequence: Synthetic oligonucleotide
ggaatttcttctgcagcacc

SEQ ID NO: 919 - DNA, 20 bp, Artificial Sequence
  Description of Artificial Sequence: Synthetic oligonucleotide
ggaatcccttttgcagcacc

SEQ ID NO: 920 - DNA, 20 bp, Artificial Sequence
  Description of Artificial Sequence: Synthetic oligonucleotide
ggaatcctttctgcagcacc

SEQ ID NO: 921 - DNA, 20 bp, Artificial Sequence
  Description of Artificial Sequence: Synthetic oligonucleotide
ggaattccttttgcagcacc

SEQ ID NO: 922 - DNA, 20 bp, Artificial Sequence
  Description of Artificial Sequence: Synthetic oligonucleotide
ggaattttttctgcagcacc

SEQ ID NO: 923 - DNA, 20 bp, Artificial Sequence
  Description of Artificial Sequence: Synthetic oligonucleotide
ggcccagactgagcacgtga

SEQ ID NO: 924 - DNA, 20 bp, Artificial Sequence
  Description of Artificial Sequence: Synthetic oligonucleotide
ggcccagactgagcacgtga

SEQ ID NO: 925 - DNA, 20 bp, Artificial Sequence
  Description of Artificial Sequence: Synthetic oligonucleotide
ggtttagactgagcacgtga

SEQ ID NO: 926 - DNA, 20 bp, Artificial Sequence
  Description of Artificial Sequence: Synthetic oligonucleotide
ggttcagactgagcacgtga

SEQ ID NO: 927 - DNA, 20 bp, Artificial Sequence
  Description of Artificial Sequence: Synthetic oligonucleotide
ggcccgggctgagcacgtga

SEQ ID NO: 928 - DNA, 20 bp, Artificial Sequence
  Description of Artificial Sequence: Synthetic oligonucleotide
ggcccggactgagcacgtga

SEQ ID NO: 929 - DNA, 20 bp, Artificial Sequence
  Description of Artificial Sequence: Synthetic oligonucleotide
ggtttggactgagcacgtga

SEQ ID NO: 930 - DNA, 20 bp, Artificial Sequence
  Description of Artificial Sequence: Synthetic oligonucleotide
ggtccggactgagcacgtga

SEQ ID NO: 931 - DNA, 20 bp, Artificial Sequence
  Description of Artificial Sequence: Synthetic oligonucleotide
ggtctagactgagcacgtga

SEQ ID NO: 932 - DNA, 20 bp, Artificial Sequence
  Description of Artificial Sequence: Synthetic oligonucleotide
ggtccagactgagcacgtga

SEQ ID NO: 933 - DNA, 20 bp, Artificial Sequence
  Description of Artificial Sequence: Synthetic oligonucleotide
ggttcggactgagcacgtga

SEQ ID NO: 934 - DNA, 19 bp, Artificial Sequence
  Description of Artificial Sequence: Synthetic oligonucleotide
ggttagactgagcacgtga

SEQ ID NO: 935 - DNA, 19 bp, Artificial Sequence
  Description of Artificial Sequence: Synthetic oligonucleotide
ggtcagactgagcacgtga

SEQ ID NO: 936 - DNA, 20 bp, Artificial Sequence
  Description of Artificial Sequence: Synthetic oligonucleotide
ggcccagactgagcacgtga

SEQ ID NO: 937 - DNA, 20 bp, Artificial Sequence
  Description of Artificial Sequence: Synthetic oligonucleotide
ggcccagactgagcacgtga

SEQ ID NO: 938 - DNA, 20 bp, Artificial Sequence
  Description of Artificial Sequence: Synthetic oligonucleotide
ggttcagactgagcacgtga

SEQ ID NO: 939 - DNA, 20 bp, Artificial Sequence
  Description of Artificial Sequence: Synthetic oligonucleotide
ggtttagactgagcacgtga

SEQ ID NO: 940 - DNA, 20 bp, Artificial Sequence
  Description of Artificial Sequence: Synthetic oligonucleotide
ggtctagactgagcacgtga

SEQ ID NO: 941 - DNA, 20 bp, Artificial Sequence
  Description of Artificial Sequence: Synthetic oligonucleotide
ggtttggactgagcacgtga

SEQ ID NO: 942 - DNA, 20 bp, Artificial Sequence
  Description of Artificial Sequence: Synthetic oligonucleotide
ggtccagactgagcacgtga

SEQ ID NO: 943 - DNA, 20 bp, Artificial Sequence
  Description of Artificial Sequence: Synthetic oligonucleotide
ggtctggactgagcacgtga

SEQ ID NO: 944 - DNA, 20 bp, Artificial Sequence
  Description of Artificial Sequence: Synthetic oligonucleotide
ggttcggactgagcacgtga

SEQ ID NO: 945 - DNA, 20 bp, Artificial Sequence
  Description of Artificial Sequence: Synthetic oligonucleotide
ggtttgggctgagcacgtga

SEQ ID NO: 946 - DNA, 20 bp, Artificial Sequence
  Description of Artificial Sequence: Synthetic oligonucleotide
ggcttagactgagcacgtga

SEQ ID NO: 947 - DNA, 20 bp, Artificial Sequence
  Description of Artificial Sequence: Synthetic oligonucleotide
ggcactgcggctggaggtgg

SEQ ID NO: 948 - DNA, 20 bp, Artificial Sequence
  Description of Artificial Sequence: Synthetic oligonucleotide
ggcactgcggctggaggtgg

SEQ ID NO: 949 - DNA, 20 bp, Artificial Sequence
  Description of Artificial Sequence: Synthetic oligonucleotide
ggtgctgcggctggaggtgg

SEQ ID NO: 950 - DNA, 20 bp, Artificial Sequence
  Description of Artificial Sequence: Synthetic oligonucleotide
ggtactgcggctggaggtgg

SEQ ID NO: 951 - DNA, 20 bp, Artificial Sequence
  Description of Artificial Sequence: Synthetic oligonucleotide
ggtattgcggctggaggtgg

SEQ ID NO: 952 - DNA, 20 bp, Artificial Sequence
  Description of Artificial Sequence: Synthetic oligonucleotide
ggtgttgcggctggaggtgg

SEQ ID NO: 953 - DNA, 20 bp, Artificial Sequence
  Description of Artificial Sequence: Synthetic oligonucleotide
ggcactgcggctggaggtgg

SEQ ID NO: 954 - DNA, 20 bp, Artificial Sequence
  Description of Artificial Sequence: Synthetic oligonucleotide
ggcactgcggctggaggtgg

SEQ ID NO: 955 - DNA, 20 bp, Artificial Sequence
  Description of Artificial Sequence: Synthetic oligonucleotide
ggtgttgcggctggaggtgg

SEQ ID NO: 956 - DNA, 20 bp, Artificial Sequence
  Description of Artificial Sequence: Synthetic oligonucleotide
ggtactgcggctggaggtgg

SEQ ID NO: 957 - DNA, 20 bp, Artificial Sequence
  Description of Artificial Sequence: Synthetic oligonucleotide
ggtgctgtggctggaggtgg

SEQ ID NO: 958 - DNA, 20 bp, Artificial Sequence
  Description of Artificial Sequence: Synthetic oligonucleotide
ggtgctgcggctggaggtgg

SEQ ID NO: 959 - DNA, 20 bp, Artificial Sequence
  Description of Artificial Sequence: Synthetic oligonucleotide
ggtgttgtggctggaggtgg

SEQ ID NO: 960 - DNA, 20 bp, Artificial Sequence
  Description of Artificial Sequence: Synthetic oligonucleotide
ggtattgcggctggaggtgg

SEQ ID NO: 961 - DNA, 20 bp, Artificial Sequence
  Description of Artificial Sequence: Synthetic oligonucleotide
ggtactgtggctggaggtgg

SEQ ID NO: 962 - DNA, 20 bp, Artificial Sequence
  Description of Artificial Sequence: Synthetic oligonucleotide
ggtgctgcggttggaggtgg

SEQ ID NO: 963 - DNA, 20 bp, Artificial Sequence
  Description of Artificial Sequence: Synthetic oligonucleotide
ggtgttgcggttggaggtgg

SEQ ID NO: 964 - DNA, 20 bp, Artificial Sequence
  Description of Artificial Sequence: Synthetic oligonucleotide
ggtactgcggttggaggtgg

SEQ ID NO: 965 - DNA, 20 bp, Artificial Sequence
  Description of Artificial Sequence: Synthetic oligonucleotide
gcgtgacttccacatgagcg

SEQ ID NO: 966 - DNA, 20 bp, Artificial Sequence
  Description of Artificial Sequence: Synthetic oligonucleotide
gcgtggcttccacatgagcg

SEQ ID NO: 967 - DNA, 20 bp, Artificial Sequence
  Description of Artificial Sequence: Synthetic oligonucleotide
gcgtgacttccacatgagcg

SEQ ID NO: 968 - DNA, 20 bp, Artificial Sequence
  Description of Artificial Sequence: Synthetic oligonucleotide
gtgtggcttccacatgagcg

SEQ ID NO: 969 - DNA, 20 bp, Artificial Sequence
  Description of Artificial Sequence: Synthetic oligonucleotide
gtgtgacttccacatgagcg

SEQ ID NO: 970 - DNA, 20 bp, Artificial Sequence
  Description of Artificial Sequence: Synthetic oligonucleotide
gcgtgacttccacatgagcg

SEQ ID NO: 971 - DNA, 20 bp, Artificial Sequence
  Description of Artificial Sequence: Synthetic oligonucleotide
gcgtgacttccacatgagcg

SEQ ID NO: 972 - DNA, 20 bp, Artificial Sequence
  Description of Artificial Sequence: Synthetic oligonucleotide
gcgtggcttccacatgagcg

SEQ ID NO: 973 - DNA, 20 bp, Artificial Sequence
  Description of Artificial Sequence: Synthetic oligonucleotide
gtgtggcttccacatgagcg

SEQ ID NO: 974 - DNA, 20 bp, Artificial Sequence
  Description of Artificial Sequence: Synthetic oligonucleotide
gcgtggcttctacatgagcg

SEQ ID NO: 975 - DNA, 20 bp, Artificial Sequence
  Description of Artificial Sequence: Synthetic oligonucleotide
gtgtgacttccacatgagcg

SEQ ID NO: 976 - DNA, 20 bp, Artificial Sequence
  Description of Artificial Sequence: Synthetic oligonucleotide
gcgtgacttctacatgagcg

SEQ ID NO: 977 - DNA, 20 bp, Artificial Sequence
  Description of Artificial Sequence: Synthetic oligonucleotide
gcgtggctttcacatgagcg

SEQ ID NO: 978 - DNA, 20 bp, Artificial Sequence
  Description of Artificial Sequence: Synthetic oligonucleotide
gcgtggtttccacatgagcg

SEQ ID NO: 979 - DNA, 20 bp, Artificial Sequence
  Description of Artificial Sequence: Synthetic oligonucleotide
gtgtggcttctacatgagcg

SEQ ID NO: 980 - DNA, 20 bp, Artificial Sequence
  Description of Artificial Sequence: Synthetic oligonucleotide
ggcactcgggggcgagagga

SEQ ID NO: 981 - DNA, 20 bp, Artificial Sequence
  Description of Artificial Sequence: Synthetic oligonucleotide
ggcactcgggggcgagagga

SEQ ID NO: 982 - DNA, 20 bp, Artificial Sequence
  Description of Artificial Sequence: Synthetic oligonucleotide
ggtactcgggggcgagagga

SEQ ID NO: 983 - DNA, 20 bp, Artificial Sequence
  Description of Artificial Sequence: Synthetic oligonucleotide
ggtgctcgggggcgagagga

SEQ ID NO: 984 - DNA, 20 bp, Artificial Sequence
  Description of Artificial Sequence: Synthetic oligonucleotide
ggtattcgggggcgagagga

SEQ ID NO: 985 - DNA, 20 bp, Artificial Sequence
  Description of Artificial Sequence: Synthetic oligonucleotide
ggcactcgggggcgagagga

SEQ ID NO: 986 - DNA, 20 bp, Artificial Sequence
  Description of Artificial Sequence: Synthetic oligonucleotide
ggcactcgggggcgagagga

SEQ ID NO: 987 - DNA, 20 bp, Artificial Sequence
  Description of Artificial Sequence: Synthetic oligonucleotide
ggtgcttgggggcgagagga

SEQ ID NO: 988 - DNA, 20 bp, Artificial Sequence
  Description of Artificial Sequence: Synthetic oligonucleotide
ggtactcgggggcgagagga

SEQ ID NO: 989 - DNA, 20 bp, Artificial Sequence
  Description of Artificial Sequence: Synthetic oligonucleotide
ggtacttgggggcgagagga

SEQ ID NO: 990 - DNA, 20 bp, Artificial Sequence
  Description of Artificial Sequence: Synthetic oligonucleotide
ggtgtttgggggcgagagga

SEQ ID NO: 991 - DNA, 20 bp, Artificial Sequence
  Description of Artificial Sequence: Synthetic oligonucleotide
ggtatttgggggcgagagga

SEQ ID NO: 992 - DNA, 20 bp, Artificial Sequence
  Description of Artificial Sequence: Synthetic oligonucleotide
ggtgctcgggggcgagagga

SEQ ID NO: 993 - DNA, 20 bp, Artificial Sequence
  Description of Artificial Sequence: Synthetic oligonucleotide
ggtattcgggggcgagagga

SEQ ID NO: 994 - DNA, 20 bp, Artificial Sequence
  Description of Artificial Sequence: Synthetic oligonucleotide
ggtgcttgggggtgagagga

SEQ ID NO: 995 - DNA, 20 bp, Artificial Sequence
  Description of Artificial Sequence: Synthetic oligonucleotide
ggtgttcgggggcgagagga

SEQ ID NO: 996 - DNA, 20 bp, Artificial Sequence
  Description of Artificial Sequence: Synthetic oligonucleotide
gagctcactgaacgctggca

SEQ ID NO: 997 - DNA, 20 bp, Artificial Sequence
  Description of Artificial Sequence: Synthetic oligonucleotide
gagctcactgaacgctggca

SEQ ID NO: 998 - DNA, 20 bp, Artificial Sequence
  Description of Artificial Sequence: Synthetic oligonucleotide
gagctcgctgaacgctggca

SEQ ID NO: 999 - DNA, 20 bp, Artificial Sequence
  Description of Artificial Sequence: Synthetic oligonucleotide
gagttcgctgaacgctggca

SEQ ID NO: 1000 - DNA, 20 bp, Artificial Sequence
  Description of Artificial Sequence: Synthetic oligonucleotide
gagtttgctgaacgctggca

SEQ ID NO: 1001 - DNA, 20 bp, Artificial Sequence
  Description of Artificial Sequence: Synthetic oligonucleotide
gagcttgctgaacgctggca

SEQ ID NO: 1002 - DNA, 20 bp, Artificial Sequence
  Description of Artificial Sequence: Synthetic oligonucleotide
gagttcactgaacgctggca

SEQ ID NO: 1003 - DNA, 20 bp, Artificial Sequence
  Description of Artificial Sequence: Synthetic oligonucleotide
gaggtcactgaacgctggca

SEQ ID NO: 1004 - DNA, 20 bp, Artificial Sequence
  Description of Artificial Sequence: Synthetic oligonucleotide
gagtttactgaacgctggca

SEQ ID NO: 1005 - DNA, 20 bp, Artificial Sequence
  Description of Artificial Sequence: Synthetic oligonucleotide
gaggtcgctgaacgctggca

SEQ ID NO: 1006 - DNA, 20 bp, Artificial Sequence
  Description of Artificial Sequence: Synthetic oligonucleotide
gagctcactgaacgctggca

SEQ ID NO: 1007 - DNA, 20 bp, Artificial Sequence
  Description of Artificial Sequence: Synthetic oligonucleotide
gagctcactgaacgctggca

SEQ ID NO: 1008 - DNA, 20 bp, Artificial Sequence
  Description of Artificial Sequence: Synthetic oligonucleotide
gagttcgctgaacgctggca

SEQ ID NO: 1009 - DNA, 20 bp, Artificial Sequence
  Description of Artificial Sequence: Synthetic oligonucleotide
gagtttgctgaacgctggca

SEQ ID NO: 1010 - DNA, 20 bp, Artificial Sequence
  Description of Artificial Sequence: Synthetic oligonucleotide
gagttcactgaacgctggca

SEQ ID NO: 1011 - DNA, 20 bp, Artificial Sequence
  Description of Artificial Sequence: Synthetic oligonucleotide
gagtttactgaacgctggca

SEQ ID NO: 1012 - DNA, 20 bp, Artificial Sequence
  Description of Artificial Sequence: Synthetic oligonucleotide
gagctcgctgaacgctggca

SEQ ID NO: 1013 - DNA, 20 bp, Artificial Sequence
  Description of Artificial Sequence: Synthetic oligonucleotide
gagcttgctgaacgctggca

SEQ ID NO: 1014 - DNA, 20 bp, Artificial Sequence
  Description of Artificial Sequence: Synthetic oligonucleotide
gaccctcagccgtgctgctc

SEQ ID NO: 1015 - DNA, 20 bp, Artificial Sequence
  Description of Artificial Sequence: Synthetic oligonucleotide
gaccctcagccgtgctgctc

SEQ ID NO: 1016 - DNA, 20 bp, Artificial Sequence
  Description of Artificial Sequence: Synthetic oligonucleotide
gattttcagccgtgctgctc

SEQ ID NO: 1017 - DNA, 20 bp, Artificial Sequence
  Description of Artificial Sequence: Synthetic oligonucleotide
gattctcagccgtgctgctc

SEQ ID NO: 1018 - DNA, 20 bp, Artificial Sequence
  Description of Artificial Sequence: Synthetic oligonucleotide
gatcctcagccgtgctgctc

SEQ ID NO: 1019 - DNA, 20 bp, Artificial Sequence
  Description of Artificial Sequence: Synthetic oligonucleotide
gaccctcggccgtgctgctc

SEQ ID NO: 1020 - DNA, 20 bp, Artificial Sequence
  Description of Artificial Sequence: Synthetic oligonucleotide
gactctcagccgtgctgctc

SEQ ID NO: 1021 - DNA, 20 bp, Artificial Sequence
  Description of Artificial Sequence: Synthetic oligonucleotide
gaccttcagccgtgctgctc

SEQ ID NO: 1022 - DNA, 20 bp, Artificial Sequence
  Description of Artificial Sequence: Synthetic oligonucleotide
gatttttagccgtgctgctc

SEQ ID NO: 1023 - DNA, 20 bp, Artificial Sequence
  Description of Artificial Sequence: Synthetic oligonucleotide
gaccctcagccgtgctgctc

SEQ ID NO: 1024 - DNA, 20 bp, Artificial Sequence
  Description of Artificial Sequence: Synthetic oligonucleotide
gaccctcagccgtgctgctc

SEQ ID NO: 1025 - DNA, 20 bp, Artificial Sequence
  Description of Artificial Sequence: Synthetic oligonucleotide
gattctcagccgtgctgctc

SEQ ID NO: 1026 - DNA, 20 bp, Artificial Sequence
  Description of Artificial Sequence: Synthetic oligonucleotide
gattttcagccgtgctgctc

SEQ ID NO: 1027 - DNA, 20 bp, Artificial Sequence
  Description of Artificial Sequence: Synthetic oligonucleotide
gattcttagccgtgctgctc

SEQ ID NO: 1028 - DNA, 20 bp, Artificial Sequence
  Description of Artificial Sequence: Synthetic oligonucleotide
gatcttcagccgtgctgctc

SEQ ID NO: 1029 - DNA, 20 bp, Artificial Sequence
  Description of Artificial Sequence: Synthetic oligonucleotide
gatcctcagccgtgctgctc

SEQ ID NO: 1030 - DNA, 20 bp, Artificial Sequence
  Description of Artificial Sequence: Synthetic oligonucleotide
gatttttagccgtgctgctc

SEQ ID NO: 1031 - DNA, 20 bp, Artificial Sequence
  Description of Artificial Sequence: Synthetic oligonucleotide
gactctcagccgtgctgctc

SEQ ID NO: 1032 - DNA, 20 bp, Artificial Sequence
  Description of Artificial Sequence: Synthetic oligonucleotide
gactttcagccgtgctgctc

SEQ ID NO: 1033 - DNA, 20 bp, Artificial Sequence
  Description of Artificial Sequence: Synthetic oligonucleotide
gatccttagccgtgctgctc

SEQ ID NO: 1034 - DNA, 20 bp, Artificial Sequence
  Description of Artificial Sequence: Synthetic oligonucleotide
gatctttagccgtgctgctc

SEQ ID NO: 1035 - DNA, 20 bp, Artificial Sequence
  Description of Artificial Sequence: Synthetic oligonucleotide
gctgactcagagaccctgag

SEQ ID NO: 1036 - DNA, 20 bp, Artificial Sequence
  Description of Artificial Sequence: Synthetic oligonucleotide
gctgactcagagaccctgag

SEQ ID NO: 1037 - DNA, 20 bp, Artificial Sequence
  Description of Artificial Sequence: Synthetic oligonucleotide
gctggctcagagaccctgag

SEQ ID NO: 1038 - DNA, 20 bp, Artificial Sequence
  Description of Artificial Sequence: Synthetic oligonucleotide
gttgactcagagaccctgag

SEQ ID NO: 1039 - DNA, 20 bp, Artificial Sequence
  Description of Artificial Sequence: Synthetic oligonucleotide
gctgactcagagaccctgag

SEQ ID NO: 1040 - DNA, 20 bp, Artificial Sequence
  Description of Artificial Sequence: Synthetic oligonucleotide
gctgactcagagaccctgag

SEQ ID NO: 1041 - DNA, 20 bp, Artificial Sequence
  Description of Artificial Sequence: Synthetic oligonucleotide
gttgactcagagaccctgag

SEQ ID NO: 1042 - DNA, 20 bp, Artificial Sequence
  Description of Artificial Sequence: Synthetic oligonucleotide
gttgacttagagaccctgag

SEQ ID NO: 1043 - DNA, 20 bp, Artificial Sequence
  Description of Artificial Sequence: Synthetic oligonucleotide
gttggctcagagaccctgag

SEQ ID NO: 1044 - DNA, 20 bp, Artificial Sequence
  Description of Artificial Sequence: Synthetic oligonucleotide
gttgattcagagaccctgag

SEQ ID NO: 1045 - DNA, 20 bp, Artificial Sequence
  Description of Artificial Sequence: Synthetic oligonucleotide
gctggctcagagaccctgag

SEQ ID NO: 1046 - DNA, 20 bp, Artificial Sequence
  Description of Artificial Sequence: Synthetic oligonucleotide
ggggctcaacatcggaagag

SEQ ID NO: 1047 - DNA, 20 bp, Artificial Sequence
  Description of Artificial Sequence: Synthetic oligonucleotide
ggggctcaacatcggaagag

SEQ ID NO: 1048 - DNA, 20 bp, Artificial Sequence
  Description of Artificial Sequence: Synthetic oligonucleotide
ggggttcaacatcggaagag

SEQ ID NO: 1049 - DNA, 20 bp, Artificial Sequence
  Description of Artificial Sequence: Synthetic oligonucleotide
ggggttcgacatcggaagag

SEQ ID NO: 1050 - DNA, 20 bp, Artificial Sequence
  Description of Artificial Sequence: Synthetic oligonucleotide
ggggtttaacatcggaagag

SEQ ID NO: 1051 - DNA, 20 bp, Artificial Sequence
  Description of Artificial Sequence: Synthetic oligonucleotide
ggggtttgacatcggaagag

SEQ ID NO: 1052 - DNA, 20 bp, Artificial Sequence
  Description of Artificial Sequence: Synthetic oligonucleotide
ggggctcgacatcggaagag

SEQ ID NO: 1053 - DNA, 19 bp, Artificial Sequence
  Description of Artificial Sequence: Synthetic oligonucleotide
ggggtcaacatcggaagag

SEQ ID NO: 1054 - DNA, 20 bp, Artificial Sequence
  Description of Artificial Sequence: Synthetic oligonucleotide
ggggctcaacatcggaagag

SEQ ID NO: 1055 - DNA, 20 bp, Artificial Sequence
  Description of Artificial Sequence: Synthetic oligonucleotide
ggggctcaacatcggaagag

SEQ ID NO: 1056 - DNA, 20 bp, Artificial Sequence
  Description of Artificial Sequence: Synthetic oligonucleotide
ggggtttgacatcggaagag

SEQ ID NO: 1057 - DNA, 20 bp, Artificial Sequence
  Description of Artificial Sequence: Synthetic oligonucleotide
ggggttcaacatcggaagag

SEQ ID NO: 1058 - DNA, 20 bp, Artificial Sequence
  Description of Artificial Sequence: Synthetic oligonucleotide
ggggtttaacatcggaagag

SEQ ID NO: 1059 - DNA, 20 bp, Artificial Sequence
  Description of Artificial Sequence: Synthetic oligonucleotide
ggggtttaacattggaagag

SEQ ID NO: 1060 - DNA, 20 bp, Artificial Sequence
  Description of Artificial Sequence: Synthetic oligonucleotide
ggggttcaacattggaagag

SEQ ID NO: 1061 - DNA, 20 bp, Artificial Sequence
  Description of Artificial Sequence: Synthetic oligonucleotide
ggggttcgacatcggaagag

SEQ ID NO: 1062 - DNA, 20 bp, Artificial Sequence
  Description of Artificial Sequence: Synthetic oligonucleotide
ggggtttgacattggaagag

SEQ ID NO: 1063 - DNA, 20 bp, Artificial Sequence
  Description of Artificial Sequence: Synthetic oligonucleotide
ggggctcaacattggaagag

SEQ ID NO: 1064 - DNA, 20 bp, Artificial Sequence
  Description of Artificial Sequence: Synthetic oligonucleotide
ggggcttgacatcggaagag

SEQ ID NO: 1065 - DNA, 20 bp, Artificial Sequence
  Description of Artificial Sequence: Synthetic oligonucleotide
ggggttcgacattggaagag

SEQ ID NO: 1066 - DNA, 20 bp, Artificial Sequence
  Description of Artificial Sequence: Synthetic oligonucleotide
gctggctcaggttcaggaga

SEQ ID NO: 1067 - DNA, 20 bp, Artificial Sequence
  Description of Artificial Sequence: Synthetic oligonucleotide
gctggctcaggttcaggaga

SEQ ID NO: 1068 - DNA, 20 bp, Artificial Sequence
  Description of Artificial Sequence: Synthetic oligonucleotide
gttggttcaggttcaggaga

SEQ ID NO: 1069 - DNA, 20 bp, Artificial Sequence
  Description of Artificial Sequence: Synthetic oligonucleotide
gttggctcaggttcaggaga

SEQ ID NO: 1070 - DNA, 20 bp, Artificial Sequence
  Description of Artificial Sequence: Synthetic oligonucleotide
gctggctcaggttcaggcga

SEQ ID NO: 1071 - DNA, 20 bp, Artificial Sequence
  Description of Artificial Sequence: Synthetic oligonucleotide
ggtggctcaggttcaggaga

SEQ ID NO: 1072 - DNA, 20 bp, Artificial Sequence
  Description of Artificial Sequence: Synthetic oligonucleotide
gctggttcaggttcaggaga

SEQ ID NO: 1073 - DNA, 20 bp, Artificial Sequence
  Description of Artificial Sequence: Synthetic oligonucleotide
gctggctcaggttcaggaga

SEQ ID NO: 1074 - DNA, 20 bp, Artificial Sequence
  Description of Artificial Sequence: Synthetic oligonucleotide
gctggctcaggttcaggaga

SEQ ID NO: 1075 - DNA, 20 bp, Artificial Sequence
  Description of Artificial Sequence: Synthetic oligonucleotide
gttggttcaggttcaggaga

SEQ ID NO: 1076 - DNA, 20 bp, Artificial Sequence
  Description of Artificial Sequence: Synthetic oligonucleotide
gttggctcaggttcaggaga

SEQ ID NO: 1077 - DNA, 20 bp, Artificial Sequence
  Description of Artificial Sequence: Synthetic oligonucleotide
gttggtttaggttcaggaga

SEQ ID NO: 1078 - DNA, 20 bp, Artificial Sequence
  Description of Artificial Sequence: Synthetic oligonucleotide
gctggttcaggttcaggaga

SEQ ID NO: 1079 - DNA, 20 bp, Artificial Sequence
  Description of Artificial Sequence: Synthetic oligonucleotide
gttggcttaggttcaggaga

SEQ ID NO: 1080 - DNA, 20 bp, Artificial Sequence
  Description of Artificial Sequence: Synthetic oligonucleotide
gctggctcaggttcaggcga

SEQ ID NO: 1081 - DNA, 20 bp, Artificial Sequence
  Description of Artificial Sequence: Synthetic oligonucleotide
gtcatcttagtcattacctg

SEQ ID NO: 1082 - DNA, 20 bp, Artificial Sequence
  Description of Artificial Sequence: Synthetic oligonucleotide
gtcatcttagtcattacctg

SEQ ID NO: 1083 - DNA, 20 bp, Artificial Sequence
  Description of Artificial Sequence: Synthetic oligonucleotide
gttatcttagtcattacctg

SEQ ID NO: 1084 - DNA, 20 bp, Artificial Sequence
  Description of Artificial Sequence: Synthetic oligonucleotide
gtcattttagtcattacctg

SEQ ID NO: 1085 - DNA, 20 bp, Artificial Sequence
  Description of Artificial Sequence: Synthetic oligonucleotide
gttattttagtcattacctg

SEQ ID NO: 1086 - DNA, 20 bp, Artificial Sequence
  Description of Artificial Sequence: Synthetic oligonucleotide
gtcgtcttagtcattacctg

SEQ ID NO: 1087 - DNA, 20 bp, Artificial Sequence
  Description of Artificial Sequence: Synthetic oligonucleotide
gttgtcttagtcattacctg

SEQ ID NO: 1088 - DNA, 20 bp, Artificial Sequence
  Description of Artificial Sequence: Synthetic oligonucleotide
gtcatcttggtcattacctg

SEQ ID NO: 1089 - DNA, 20 bp, Artificial Sequence
  Description of Artificial Sequence: Synthetic oligonucleotide
gtcatcttagtcattacctg

SEQ ID NO: 1090 - DNA, 20 bp, Artificial Sequence
  Description of Artificial Sequence: Synthetic oligonucleotide
gtcatcttagtcattacctg

SEQ ID NO: 1091 - DNA, 20 bp, Artificial Sequence
  Description of Artificial Sequence: Synthetic oligonucleotide
gttatcttagtcattacctg

SEQ ID NO: 1092 - DNA, 20 bp, Artificial Sequence
  Description of Artificial Sequence: Synthetic oligonucleotide
gttattttagtcattacctg

SEQ ID NO: 1093 - DNA, 20 bp, Artificial Sequence
  Description of Artificial Sequence: Synthetic oligonucleotide
gttgtcttagtcattacctg

SEQ ID NO: 1094 - DNA, 20 bp, Artificial Sequence
  Description of Artificial Sequence: Synthetic oligonucleotide
gttatcttagttattacctg

SEQ ID NO: 1095 - DNA, 20 bp, Artificial Sequence
  Description of Artificial Sequence: Synthetic oligonucleotide
gtcattttagttattacctg

SEQ ID NO: 1096 - DNA, 20 bp, Artificial Sequence
  Description of Artificial Sequence: Synthetic oligonucleotide
gttgttttagtcattacctg

SEQ ID NO: 1097 - DNA, 20 bp, Artificial Sequence
  Description of Artificial Sequence: Synthetic oligonucleotide
gaggacgtgtgtgtctgtgt

SEQ ID NO: 1098 - DNA, 20 bp, Artificial Sequence
  Description of Artificial Sequence: Synthetic oligonucleotide
gaggacgtgtgtgtctgtgt

SEQ ID NO: 1099 - DNA, 20 bp, Artificial Sequence
  Description of Artificial Sequence: Synthetic oligonucleotide
gagggcgtgtgtgtctgtgt

SEQ ID NO: 1100 - DNA, 20 bp, Artificial Sequence
  Description of Artificial Sequence: Synthetic oligonucleotide
gagggtgtgtgtgtctgtgt

SEQ ID NO: 1101 - DNA, 18 bp, Artificial Sequence
  Description of Artificial Sequence: Synthetic oligonucleotide
gagggtgtgtgtctgtgt

SEQ ID NO: 1102 - DNA, 20 bp, Artificial Sequence
  Description of Artificial Sequence: Synthetic oligonucleotide
gaggatgtgtgtgtctgtgt

SEQ ID NO: 1103 - DNA, 20 bp, Artificial Sequence
  Description of Artificial Sequence: Synthetic oligonucleotide
gagggggtgtgtgtctgtgt

SEQ ID NO: 1104 - DNA, 20 bp, Artificial Sequence
  Description of Artificial Sequence: Synthetic oligonucleotide
gaggacgtgtgtgtctgtgt

SEQ ID NO: 1105 - DNA, 20 bp, Artificial Sequence
  Description of Artificial Sequence: Synthetic oligonucleotide
gaggacgtgtgtgtctgtgt

SEQ ID NO: 1106 - DNA, 20 bp, Artificial Sequence
  Description of Artificial Sequence: Synthetic oligonucleotide
gagggtgtgtgtgtctgtgt

SEQ ID NO: 1107 - DNA, 20 bp, Artificial Sequence
  Description of Artificial Sequence: Synthetic oligonucleotide
gagggcgtgtgtgtctgtgt

SEQ ID NO: 1108 - DNA, 20 bp, Artificial Sequence
  Description of Artificial Sequence: Synthetic oligonucleotide
gagggtgtgtgtgtttgtgt

SEQ ID NO: 1109 - DNA, 20 bp, Artificial Sequence
  Description of Artificial Sequence: Synthetic oligonucleotide
gaggatgtgtgtgtctgtgt

1. A bifunctional adenine and cytosine base editor (BACE) comprising:
(i) an adenosine deaminase domain that decreases RNA editing activity while preserving DNA editing activity;
(ii) a cytidine deaminase domain;
(iii) one or multiple uracil-n-clycosalyse inhibitors (UGIs); and
(iv) a programmable DNA binding domain; and
(v) optionally further comprising one or more nuclear localization sequences.

2. The BACE of claim 1, wherein the adenosine deaminase domain comprises a wild type (SEQ ID NO: 98) and/or engineered adenosine deaminase TadA monomer or dimer.

3. The BACE of claim 2, wherein the engineered adenosine deaminase TadA monomer or dimer comprises a homodimeric or heterodimeric TadA domain from ABEmax (SEQ ID NO:226), ABE7.10 (SEQ ID NO:227), or ABE8e (SEQ ID NO: 145); monomer or dimer TadA from ABE 0.1, 0.2, 1.1, 1.2, 2.1, 2.2, 2.3, 2.4, 2.5, 2.6, 2.7, 2.8, 2.9, 2.10, 2.11, 2.12, 3.1, 3.2, 3.3, 3.4, 3.5, 3.6, 3.7, 3.8, 4.1, 4.2, 4.3, 5.1, 5.2, 5.3, 5.4, 5.5, 5.6, 5.7, 5.8, 5.9, 5.10, 5.11, 5.12, 5.13, 5.14, 6.1, 6.2, 6.3, 6.4, 6.5, 6.6, 7.1, 7.2, 7.3, 7.4, 7.5, 7.6, 7.7, 7.8, 7.9, 7.10 (SEQ ID NO: 139), ABEmax (SEQ ID NO: 228), ABE8.8 (SEQ ID NO: 148), ABE8.13 (SEQ ID NO: 149), ABE8.17 (SEQ ID NO: 150), ABE8.20 (SEQ ID NO: 151), ABE8e (SEQ ID NO: 145), or K20A/R21A, V82G or V106W variants thereof; E. coli TadA monomer, or homo- or heterodimers thereof fused to the N or C terminus, optionally comprising one or more mutations in either or both monomers, optionally TadA from miniABEmax-V82G (SEQ ID 223), miniABEmax-K20A/R21A (SEQ ID 224), miniABEmax-V106W (SEQ ID 225), or another variant listed in Tables C, N, and O).

4. The BACE of claim 1, wherein the adenosine deaminase domain comprises one or more mutations corresponding to E. coli TadA mutations in one or more TadA monomers shown in Table N, or an homologue or orthologue thereof, optionally a TadA protein in Table C.

5. The BACE of claim 1, wherein the cytidine deaminase domain is from Table A or B, preferably pmCDA1, rat APOBEC1, human APOBEC3A, or human AID, or a variation thereof with reduced RNA off-target editing

6. The BACE of claim 5, wherein the cytidine deaminase domain is a rat APOBEC1, or an ortho- or paralogue thereof as listed in Tables A or B, optionally comprising one or more mutations that decrease RNA editing activity while preserving DNA editing activity, preferably wherein the mutations are at amino acid positions that correspond to residues P29, R33, K34, W90Y, R126E, R132E, E181, and/or L182 of rat apolipoprotein B mRNA editing enzyme, catalytic polypeptide-like 1 (rAPOBEC1, SEQ ID NO:67).

7. The BACE of claim 6, wherein the cytidine deaminase domain comprises one or more mutations corresponding to P29F, P29T, R33A, K34A, R33A+K34A (double mutant), W90Y, R126E, R132E, W90Y+R126E (double mutant), R126E+R132E (double mutant), W90Y+R132E (double mutant), W90Y+R126E+R132E (triple mutant), E181Q and/or L182A of SEQ ID NO:67 (rAPOBEC1, Rattus norvegicus APOBEC1).

8. The BACE of claim 7, wherein the cytidine deaminase domain further comprises one or more mutations at residues corresponding to E24, V25; R118, Y120, H121, R126; W224-K229; P168-I186; L173+L180; R15, R16, R17, to K15-17 & A15-17; Deletion E181-L210; P190+P191; Deletion L210-K229 (C-terminal); and/or Deletion S2-L14 (N-terminal) of SEQ ID NO:67, Table O.

9. The BACE of claim 1, wherein the one or more nuclear localization sequences comprise a bipartite NLS comprising the sequence KRTADGSEFEPKKKRKV (SEQ ID NO:229); an SV40 large T antigen NLS (PKKKRRV (SEQ ID NO:221)); or a nucleoplasmin NLS (KRPAATKKAGQAKKKK (SEQ ID NO:222)).

10. The BACE of claim 1, comprising a linker between the adenosine deaminase domain and/or between the adenosine deaminase domain or single-chain dimers and the programmable DNA binding domain.

11. (canceled)

12. The BACE of claim 1, comprising:
(i) an N-terminal adenosine deaminase domain, preferably mutant TadA* monomer or dimer, and a C-terminal cytidine deaminase domain, preferably pmCDA1 or rAPOBEC1 or hA3A or AID, or
(ii) an N-terminal cytidine deaminase domain, preferably pmCDA1 or rAPOBEC1 or hA3A or AID, and a C-terminal adenosine deaminase domain, preferably mutant TadA* monomer or dimer.

13. The BACE of claim 1, comprising a heterodimeric combined N-terminal adenosine and cytidine deaminase fusion, preferably pmCDA1 or rAPOBEC1 or hA3A or AID fused to one or more TadA monomers or dimers with an intervening linker, or a heterodimeric combined C-terminal adenosine and cytidine deaminase fusion, preferably pmCDA1 or rAPOBEC1 or hA3A or AID fused to one or more TadA monomers or dimers with an intervening linker.

14. The BACE of claim 1, wherein the programmable DNA binding domain is selected from the group consisting of engineered C2H2 zinc-fingers, transcription activator effector-like effectors (TALEs), and Clustered Regularly Interspaced Short Palindromic Repeats (CRISPR) Cas RNA-guided nucleases (RGNs) and variants thereof.

15. The BACE of claim 1, wherein the CRISPR RGN is an ssDNA nickase or is catalytically inactive.

16. The BACE of claim 1, wherein the CRISPR RGN is a Cas9, CasX, or Cas12a that has ssDNA nickase activity or is catalytically inactive.

17. The BACE of claim 16, wherein the programmable DNA binding domain comprises Cas9-D10A, CasX with Asp672, Glu769 and Asp935 mutated to alanine separately or together to obtain dDpbCasX, dAsCpf1 (D908A), or dLbCpf1 (D832A).

18. The BACE of claim 1, comprising a sequence that is at least 80% identical to one of SEQ ID NOs:140-144.

19. Abase editing system comprising:
(i) The BACE of claim 1, wherein the programmable DNA binding domain is a CRISPR Cas RGN or a variant thereof; and
(ii) at least one guide RNA compatible with the base editor that directs the base editor to a target sequence.

20. An isolated nucleic acid encoding the BACE of claim 1.

21. A vector comprising the isolated nucleic acid of claim 20.

22. An isolated host cell, preferably a mammalian host cell, comprising the nucleic acid of claim 20.

23. The isolated host cell of claim 22, which expresses the BACE of claim 1.

24. A method of deaminating a selected adenine and/or cytosine in a target sequence in a nucleic acid, the method comprising contacting the nucleic acid with the BACE of claim 1.

25. The method of claim 24, wherein the programmable DNA binding domain is a CRISPR Cas RGN or a variant thereof, and the method further comprises contacting the nucleic acid with at least one guide RNA compatible with the base editor that directs the base editor to the target sequence.

26. A composition comprising a purified the base editing system f claim 19.

27. (canceled)

28. The composition of claim 26, comprising one or more ribonucleoprotein (RNP) complexes.

29. A method of inducing an amino acid change in a polypeptide, the method comprising contacting a nucleotide sequence that encodes the polypeptide to be modified with the BACE of any claim 1, optionally wherein the amino acid change comprises one of the amino acid changes listed in Table D, optionally wherein the amino acid change is one that can or cannot be targeted by CBE and/or ABE.

30. The method of claim 29, wherein the amino acid change corrects a disease-related mutation shown in Tables E, I-K, or introduces a multi-nucleotide variant (MNV) as shown in Tables F-H.

31. A method of generating two or more sets of nucleic acids, each set comprising a plurality of sequences, wherein each set comprises one or more nucleic acids having the same sequence, and wherein each set differs from each of the other sets by at least one nucleotide, the method comprising:
(i) providing a first nucleic acid comprising a first sequence;
(ii) contacting the first set of nucleic acids with the BACE of claim 1, wherein the programmable DNA binding domain is a CRISPR Cas RGN or a variant thereof; and a least one guide RNA compatible with the base editor that directs the base editor to alter a first nucleotide in the first sequence;
(iii) isolating a second nucleic acid comprising a sequence comprising at least one modification in the nucleotide sequence as compared to the first nucleic acid, and optionally amplifying the second nucleic acid, to provide a second set of nucleic acids; and
(iv) optionally repeating steps (i)-(iii) until a desired number of sets is obtained.

32. The method of claim 31, comprising repeating steps (i)-(iii) until a plurality of sets are obtained comprising a mutation at each position in a selection region of the sequence of the nucleic acid.
